(19) United States
(12) Patent Application Publication
(10) Pub. No.: US 2011/0059090 A1
(43) Pub. Date: Mar. 10, 2011

(54) AMINO ACID SEQUENCES DIRECTED AGAINST HER2 AND POLYPEPTIDES COMPRISING THE SAME FOR THE TREATMENT OF CANCERS AND/OR TUMORS

(75) Inventors: Hilde Adi Pierrette Revets, Meise (BE); Carlo Boutton, Wielsbeke (BE); Hendricus Renerus Jacobus Mattheus Hoogenboom, Maastricht (NL)

(73) Assignee: Ablynx N.V., Ghent-Zwijnaarde (BE)

(21) Appl. No.: 12/744,991

(22) PCT Filed: Nov. 27, 2008
(86) PCT No.: PCT/EP08/66363

§ 371 Date: Oct. 20, 2010

Related U.S. Application Data
(60) Provisional application No. 61/004,332, filed on Nov. 27, 2007.
(60) Provisional application No. 61/005,265, filed on Dec. 4, 2007.
(60) Provisional application No. 61/005,324, filed on Dec. 4, 2007.
(60) Provisional application No. 61/005,331, filed on Dec. 4, 2007.

(51) Int. Cl. A61K 39/395; C07K 16/28; C12N 15/13; C12N 5/16; C12P 21/00; C40B 30/04; A61P 35/00

(52) U.S. Cl. 424/138.1; 530/387.7; 530/387.3; 536/23.53; 435/326; 435/69.6; 506/9

(57) ABSTRACT

The present invention relates to amino acid sequences and Nanobodies that are directed against Epidermal Growth Factor Receptor 2 (HER2), as well as to compounds or constructs, and in particular proteins and polypeptides, that comprise or essentially consist of one or more such amino acid sequences.

[0001] The present invention relates to amino acid sequences that are directed against (as defined herein) Epidermal Growth Factor Receptor 2 (HER2), as well as to compounds or constructs, and in particular proteins and polypeptides, that comprise or essentially consist of one or more such amino acid sequences (also referred to herein as “amino acid sequences of the invention”, “compounds of the invention”, and “polypeptides of the invention”, respectively).

[0002] The invention also relates to nucleic acids encoding such amino acid sequences and polypeptides (also referred to herein as “nucleic acids of the invention” or “nucleotide sequences of the invention”); to methods for preparing such amino acid sequences and polypeptides; to host cells expressing or capable of expressing such amino acid sequences or polypeptides; to compositions, and in particular to pharmaceutical compositions, that comprise such amino acid sequences, polypeptides, nucleic acids and/or host cells; and to uses of such amino acid sequences or polypeptides, nucleic acids, host cells and/or compositions, in particular for prophylactic, therapeutic or diagnostic purposes, such as the prophylactic, therapeutic or diagnostic purposes mentioned herein.

[0003] Other aspects, embodiments, advantages and applications of the invention will become clear from the further description herein.

[0004] HER2 (also known as HER-2, Her-2, ErbB-2, ERBB2, EGF receptor 2, HER2/neu) is a member of the ErbB protein family, also known as the ERBB or the epidermal growth factor receptor family. This subclass I of the receptor tyrosine kinase (RTK) superfamily comprises four members: EGFR/ERBB1, HER2/ERBB2, HER3/ERBB3 and HER4/ERBB4. All members have an extracellular ligand-binding region, a single membrane-spanning region and a cytoplasmic tyrosine-kinase-containing domain. The ERBB receptors are expressed in various tissues of epithelial, mesenchymal and neuronal origin. Under normal physiological conditions, activation of the ERBB receptors is controlled by the spatial and temporal expression of their ligands, which are members of the EGF family of growth factors (Riese and Stern, 1998, Bioessays 20: 41; Yarden and Sliwkowski, 2001, Nature Rev. Mol. Cell. Biol. 2: 127). Ligand binding to ERBB receptors induces the formation of receptor homo- and heterodimers and activation of the intrinsic kinase domain, resulting in phosphorylation on specific tyrosine residues within the cytoplasmic tail. These phosphorylated residues serve as docking sites for a range of proteins, the recruitment of which leads to the activation of intracellular signalling pathways (Yarden and Sliwkowski, 2001, Nature Rev. Mol. Cell. Biol. 2: 127; Olayioye et al. 2000, EMBO J. 19: 3159; Schlessinger, 2004, Science 306: 1506; Hynes and Lane, 2005, Nature Reviews/Cancer 5: 341).

[0005] For the amino acid sequence of HER-2, reference is made to the sequences mentioned under Genbank accession numbers NM 001005862 en NM 004448 (both incorporated herein by reference). For the domain(s) of HER-2 involved in the interaction between HER-2 and Omnitarg and the amino acid sequence(s) thereof, reference is made to Franklin et al. (2004, Cancer cell 5:317-328; also incorporated herein by reference). For the domains of HER-2 involved in the interaction between HER-2 and Herceptin® and the amino acid sequence(s) thereof, reference is made to Cho et al. (2003, Nature 421:756-760; also incorporated herein by reference).

[0006] HER2 is thought to be an orphan receptor, with none of the EGF family of ligands able to activate it. However, ErbB receptors dimerise on ligand binding, and HER2 is the preferential dimerisation partner of other members of the ErbB family (Graus-Porta et al, 1997, EMBO J. 16: 1647).

[0007] The extracellular region of each ERBB receptor consists of four domains (I-IV). The structure of HER2's extracellular region is radically different from the other EGF receptors. In the other EGF receptors, in non-activated state, domain II binds to domain IV. Upon binding to domains I and III, the activating growth factor (ligand) selects and stabilizes a conformation that allows a dimerization arm to extend from domain II to interact with an ERBB dimer partner. HER2, on the other hand, has a fixed conformation that resembles the ligand-activated state: the domain II-IV interaction is absent and the dimerization loop in domain II is continuously exposed (in detail discussed in Hynes and Lane, 2005, Nature Reviews/Cancer 5: 341, Garrett et al. 2003, Mol. Cell. 11: 495; Cho et al. 2003, Nature 421: 756). This also explains why HER2 is the preferred dimerization partner.

[0008] Amplification of HER-2 leading to overexpression of the receptor, originally detected in a subset of breast tumours, occurs in various human cancers including ovarian, stomach, bladder, gastric and salivary cancers (Holbro and Hynes, 2004, Annu. Rev. Pharmacol. Toxicol. 44:195; Hynes and Stern, 1994, Biochim. Biophys. Acta 1198: 165). Approximately 25-30 percent of breast cancers have an amplification of the HER2/neu gene or overexpression of its protein product. Overexpression of this receptor in breast cancer is associated with increased disease recurrence and worse prognosis. Therefore, ERBB receptors have been intensely pursued as therapeutic targets (Holbro and Hynes, 2004, Annu. Rev. Pharmacol. Toxicol. 44:195).

[0009] mAb4D5, isolated by Ullrich et al. (Mol. Cell. Biol. 1989, 9: 1165), and trastuzumab (marketed as Herceptin®), its humanized (human IgG1 backbone, murine complementary-determining regions) variant (Carter et al. 1992, Proc. Natl. Acad. Sci. USA 89: 4285), block proliferation of HER2-overexpressing breast cancer cells. The structure of the trastuzumab Fab fragment bound to the extracellular portion of HER2 indicates that its epitope is toward the carboxyterminus of domain IV (Cho et al. 2003, Nature 421: 756). Domain IV does not participate in receptor dimerization, and blockade of dimerization does not explain the mechanism of action of this antibody. The mechanisms underlying trastuzumab's clinical efficacy is still under debate and seems to be multifaceted. Its inherent ability to recruit immune effector cells such as macrophages and monocytes to the tumor through the binding of its constant Fc domain to specific receptors on these cells, might be relevant for its anti-tumor activity. In addition to this Fc-mediated functions, preclinical studies have shown that the antibody downregulates HER2 levels (Hudziak et al. 1989, Mol. Cell. Biol 9: 1165) and HER2-mediated signaling pathways (Lane et al. 2000, Mol. Cell. Biol. 20: 3210, Motoyama et al. 2002, Cancer Res. 62: 3151). Furthermore, metalloproteinase-mediated. HER2 ectodomain shedding has been proposed to cause constitutive HER2 signaling and trastuzumab also blocks this process (Molina et al. 2001, Cancer Res. 61: 4744). Trastuzumab is only effective in breast cancer where the HER2/neu receptor is overexpressed. Clinical trials showed that the addition of trastuzumab to standard chemotherapy prolonged relapse-free survival, leading to the approval of the drug for treatment of HER2-overexpressing metastatic breast cancer patients.

[0010] Another monoclonal antibody, pertuzumab (Omnitarg) (Olayioye, 2001, Breast Cancer Res 3: 385), which inhibits ligand activation of an ErbB hetero-oligomer comprising HER2 and HER3, HER4 or EGFR, is in advanced clinical trials. Pertuzumab binds to HER2 near the center of domain II. Binding is predicted to sterically block the region necessary for HER2 dimerization with other ERBBs (Franklin et al. 2004, Cancer Cell 5: 317), Pertuzumab but not trastuzumab inhibits the growth of tumors displaying low HER2 levels (Agus et al. 2002, Cancer Cell 2: 127).

[0011] A specific, but non-limiting object of the invention is to provide therapeutic compounds that have improved therapeutic and/or pharmacological properties and/or other advantageous properties (such as, for example, improved ease of preparation and/or reduced costs of goods), compared to these conventional antibodies. These improved and advantageous properties will become clear from the further description herein. The therapeutic compounds provided by the invention may, for example, have an increased avidity and/or potency, an increased selectivity and/or they may be capable of partially or totally blocking certain (one or more) sites.

[0012] The polypeptides and compositions of the present invention can generally be used to bind HER2 and, by this binding to HER2, modulate, and in particular inhibit or prevent, the signalling that is mediated by HER2, to modulate the biological pathways in which HER2 is involved, and/or to modulate the biological mechanisms, responses and effects associated with such signalling or these pathways (which are also referred to herein as “modes of action” of the polypeptides and compositions of the invention).

[0013] One specific, non-limiting, object of the invention is to provide therapeutic compounds that combine two or more modes of action, e.g. by blocking of two or more different cell signalling pathways. One specific, but non-limiting object of the invention is to provide therapeutic compounds that combine the mode of action of Herceptin® and Omnitarg.

[0014] The polypeptides and compositions of the present invention can be used to modulate, and in particular inhibit and/or prevent, dimerization of HER2 with an ERBB receptor, and thus to modulate, and in particular inhibit or prevent, the signalling that is mediated by dimerization of HER2 with said ERBB receptor, to modulate the biological pathways in which HER2 and/or said ERBB receptor are involved, and/or to modulate the biological mechanisms, responses and effects associated with such signalling or these pathways.

[0015] As such, the polypeptides and compositions of the present invention can be used for the prevention and treatment (as defined herein) of cancers and/or tumors. Generally, “cancers and/or tumors” can be defined as diseases and disorders that can be prevented and/or treated, respectively, by suitably administering to a subject in need thereof (i.e. having the disease or disorder or at least one symptom thereof and/or at risk of attracting or developing the disease or disorder) of either a polypeptide or composition of the invention (and in particular, of a pharmaceutically active amount thereof) and/or of a known active principle active against HER2 or a biological pathway or mechanism in which HER2 is involved (and in particular, of a pharmaceutically active amount thereof). Examples of such cancers and/or tumors will be clear to the skilled person based on the disclosure herein, and for example include the following diseases and disorders: breast cancer and/or tumors, ovarian cancer and/or tumors, stomach cancer and/or tumors, bladder cancer and/or tumors, gastric cancer and/or tumors, salivary cancer and/or tumors, and prostate cancer.

[0016] In particular, the polypeptides and compositions of the present invention can be used for the prevention and treatment of cancers and/or tumors which are characterized by excessive and/or unwanted signalling mediated by HER2 or by the pathway(s) in which HER2 is involved. Examples of such cancers and/or tumors will again be clear to the skilled person based on the disclosure herein.

[0017] Thus, without being limited thereto, the amino acid sequences and polypeptides of the invention can for example be used to prevent and/or to treat all diseases and disorders that are currently being prevented or treated with active principles that can modulate HER2-mediated signalling, such as those mentioned in the prior art cited above. It is also envisaged that the polypeptides of the invention can be used to prevent and/or to treat all diseases and disorders for which treatment with such active principles is currently being developed, has been proposed, or will be proposed or developed in future. In addition, it is envisaged that, because of their favourable properties as further described herein, the polypeptides of the present invention may be used for the prevention and treatment of other diseases and disorders than those for which these known active principles are being used or will be proposed or developed; and/or that the polypeptides of the present invention may provide new methods and regimens for treating the diseases and disorders described herein.

[0018] Other applications and uses of the amino acid sequences and polypeptides of the invention will become clear to the skilled person from the further disclosure herein.

[0019] Generally, it is an object of the invention to provide pharmacologically active agents, as well as compositions comprising the same, that can be used in the diagnosis, prevention and/or treatment of cancers and/or tumors and of the further diseases and disorders mentioned herein; and to provide methods for the diagnosis, prevention and/or treatment of such diseases and disorders that involve the administration and/or use of such agents and compositions.

[0020] In particular, it is an object of the invention to provide such pharmacologically active agents, compositions and/or methods that have certain advantages compared to the agents, compositions and/or methods that are currently used and/or known in the art. These advantages will become clear from the further description below.

[0021] More in particular, it is an object of the invention to provide therapeutic proteins that can be used as pharmacologically active agents, as well as compositions comprising the same, for the diagnosis, prevention and/or treatment of cancers and/or tumors and of the further diseases and disorders mentioned herein; and to provide methods for the diagnosis, prevention and/or treatment of such diseases and disorders that involve the administration and/or the use of such therapeutic proteins and compositions.

[0022] Accordingly, it is a specific object of the present invention to provide amino acid sequences that are directed against (as defined herein) HER2, in particular against HER2 from a warm-blooded animal, more in particular against HER2 from a mammal, and especially against human HER2 (and specifically, against human HER-2 with the amino acid sequence given under Genbank accession numbers NM 001005862 en NM 004448); and to provide proteins and polypeptides comprising or essentially consisting of at least one such amino acid sequence.

[0023] In particular, it is a specific object of the present invention to provide such amino acid sequences and such proteins and/or polypeptides that are suitable for prophylactic, therapeutic and/or diagnostic use in a warm-blooded animal, and in particular in a mammal, and more in particular in a human being.

[0024] More in particular, it is a specific object of the present invention to provide such amino acid sequences and such proteins and/or polypeptides that can be used for the prevention, treatment, alleviation and/or diagnosis of one or more diseases, disorders or conditions associated with HER2 and/or mediated by HER2 (such as the diseases, disorders and conditions mentioned herein) in a warm-blooded animal, in particular in a mammal, and more in particular in a human being.

[0025] It is also a specific object of the invention to provide such amino acid sequences and such proteins and/or polypeptides that can be used in the preparation of pharmaceutical or veterinary compositions for the prevention and/or treatment of one or more diseases, disorders or conditions associated with and/or mediated by HER2 (such as the diseases, disorders and conditions mentioned herein) in a warm-blooded animal, in particular in a mammal, and more in particular in a human being.

[0026] In the invention, generally, these objects are achieved by the use of the amino acid sequences, proteins, polypeptides and compositions that are described herein.

[0027] In general, the invention provides amino acid sequences that are directed against (as defined herein) and/or can specifically bind (as defined herein) to HER2; as well as compounds and constructs, and in particular proteins and polypeptides, that comprise at least one such amino acid sequence.

[0028] More in particular, the invention provides amino acid sequences that can bind to HER2 with an affinity (suitably measured and/or expressed as a K_{D}-value (actual or apparent), a K_{A}-value (actual or apparent), a kₒₙ-rate and/or a k_{off}-rate, or alternatively as an IC₅₀ value, as further described herein) that is as defined herein; as well as compounds and constructs, and in particular proteins and polypeptides, that comprise at least one such amino acid sequence.

[0029] In particular, amino acid sequences and polypeptides of the invention are preferably such that they:
[0030] bind to HER2 with a dissociation constant (K_{D}) of 10⁻⁵ to 10⁻¹² moles/liter or less, and preferably 10⁻⁷ to 10⁻¹² moles/liter or less and more preferably 10⁻⁸ to 10⁻¹² moles/liter (i.e. with an association constant (K_{A}) of 10⁵ to 10¹² liter/moles or more, and preferably 10⁷ to 10¹² liter/moles or more and more preferably 10⁸ to 10¹² liter/moles);
   and/or such that they:
[0031] bind to HER2 with a kₒₙ-rate of between 10² M⁻¹ s⁻¹ to about 10⁷ M⁻¹ s⁻¹, preferably between 10³ M⁻¹ s⁻¹ and 10⁷ M⁻¹ s⁻¹, more preferably between 10⁴M⁻¹ s⁻¹ and 10⁷ M⁻¹ s⁻¹, such as between 10⁵ M⁻¹ s⁻¹ and 10⁷ M⁻¹ s⁻¹;
   and/or such that they:
[0032] bind to HER2 with a k_{off} rate between 1 s⁻¹ (t_{1/2}=0.69 s) and 10⁻⁶ s⁻¹ (providing a near irreversible complex with a t_{1/2} of multiple days), preferably between 10⁻² s⁻¹ and 10⁻⁶ s⁻¹, more preferably between 10⁻³ s⁻¹ and 10⁻⁶ s⁻¹, such as between 10⁻⁴ s⁻¹ and 10⁻⁶ s⁻¹.

[0033] Preferably, a monovalent amino acid sequence of the invention (or a polypeptide that contains only one amino acid sequence of the invention) is preferably such that it will bind to HER2 with an affinity less than 500 nM, preferably less than 200 nM, more preferably less than 10 nM, such as less than 500 pM.

[0034] Some preferred IC₅₀ values for binding of the amino acid sequences or polypeptides of the invention to HER2 will become clear from the further description and examples herein.

[0035] For binding to HER2, an amino acid sequence of the invention will usually contain within its amino acid sequence one or more amino acid residues or one or more stretches of amino acid residues (i.e. with each “stretch” comprising two or more amino acid residues that are adjacent to each other or in close proximity to each other, i.e. in the primary or tertiary structure of the amino acid sequence) via which the amino acid sequence of the invention can bind to HER2, which amino acid residues or stretches of amino acid residues thus form the “site” for binding to HER2 (also referred to herein as the “antigen binding site”).

[0036] The amino acid sequences provided by the invention are preferably in essentially isolated form (as defined herein), or form part of a protein or polypeptide of the invention (as defined herein), which may comprise or essentially consist of one or more amino acid sequences of the invention and which may optionally further comprise one or more further amino acid sequences (all optionally linked via one or more suitable linkers). For example, and without limitation, the one or more amino acid sequences of the invention may be used as a binding unit in such a protein or polypeptide, which may optionally contain one or more further amino acid sequences that can serve as a binding unit (i.e. against one or more other targets than HER2), so as to provide a monovalent, multivalent or multispecific polypeptide of the invention, respectively, all as described herein. Such a protein or polypeptide may also be in essentially isolated form (as defined herein).

[0037] The amino acid sequences and polypeptides of the invention as such preferably essentially consist of a single amino acid chain that is not linked via disulphide bridges to any other amino acid sequence or chain (but that may or may not contain one or more intramolecular disulphide bridges. For example, it is known that Nanobodies—as described herein—may sometimes contain a disulphide bridge between CDR3 and CDR1 or FR2). However, it should be noted that one or more amino acid sequences of the invention may be linked to each other and/or to other amino acid sequences (e.g. via disulphide bridges) to provide peptide constructs that may also be useful in the invention (for example Fab′ fragments, F(ab′)₂ fragments, ScFv constructs, “diabodies” and other multispecific constructs. Reference is for example made to the review by Holliger and Hudson, Nat Biotechnol. 2005 September; 23(9):1126-36).

[0038] Generally, when an amino acid sequence of the invention (or a compound, construct or polypeptide comprising the same) is intended for administration to a subject (for example for therapeutic and/or diagnostic purposes as described herein), it is preferably either an amino acid sequence that does not occur naturally in said subject; or, when it does occur naturally in said subject, in essentially isolated form (as defined herein).

[0039] It will also be clear to the skilled person that for pharmaceutical use, the amino acid sequences of the invention (as well as compounds, constructs and polypeptides comprising the same) are preferably directed against human HER2; whereas for veterinary purposes, the amino acid sequences and polypeptides of the invention are preferably directed against HER2 from the species to be treated, or at least cross-reactive with HER2 from the species to be treated.

[0040] Furthermore, an amino acid sequence of the invention may optionally, and in addition to the at least one binding site for binding against HER2, contain one or more further binding sites for binding against other antigens, proteins or targets. The efficacy of the amino acid sequences and polypeptides of the invention, and of compositions comprising the same, can be tested using any suitable in vitro assay, cell-based assay, in vivo assay and/or animal model known per se, or any combination thereof, depending on the specific disease or disorder involved. Suitable assays and animal models will be clear to the skilled person, and for example include BIAcore binding assay, FACS binding and/or competition assay, ELISA binding and/or competition assay, FMAT binding and/or competition assay, Alphascreen binding and/or competition assay, tumor (e.g. SKBR3) cell proliferation assay (Hudziak et al., Molecular and Cellular Biology 9:1165-1172, 1989), cell signalling assays (Agus et al., Cancer Cell 2:127-136, 2002), SCID mice with implanted tumor (i.e. Xenograft mice) (Agus et al., Cancer Cell 2:127-136, 2002), HER2-transgenic mice (Scwall et al., Breast Cancer Res 5(Suppl 1):14, 2003), as well as the assays and animal models used in the experimental part below and in the prior art cited herein.

[0041] Also, according to the invention, amino acid sequences and polypeptides that are directed against HER2 from a first species of warm-blooded animal may or may not show cross-reactivity with HER2 from one or more other species of warm-blooded animal. For example, amino acid sequences and polypeptides directed against human HER2 may or may not show cross reactivity with HER2 from one or more other species of primates (such as, without limitation, monkeys from the genus Macaca (such as, and in particular, cynomologus monkeys (Macaca fascicularis) and/or rhesus monkeys (Macaca mulatta)) and baboon (Papio ursinus)) and/or with HER2 from one or more species of animals that are often used in animal models for diseases (for example mouse, rat, rabbit, pig or dog), and in particular in animal models for diseases and disorders associated with HER2 (such as the species and animal models mentioned herein). In this respect, it will be clear to the skilled person that such cross-reactivity, when present, may have advantages from a drug development point of view, since it allows the amino acid sequences and polypeptides against human. HER2 to be tested in such disease models.

[0042] More generally, amino acid sequences and polypeptides of the invention that are cross-reactive with HER2 from multiple species of mammal will usually be advantageous for use in veterinary applications, since it will allow the same amino acid sequence or polypeptide to be used across multiple species. Thus, it is also encompassed within the scope of the invention that amino acid sequences and polypeptides directed against HER2 from one species of animal (such as amino acid sequences and polypeptides against human HER2) can be used in the treatment of another species of animal, as long as the use of the amino acid sequences and/or polypeptides provide the desired effects in the species to be treated.

[0043] The present invention is in its broadest sense also not particularly limited to or defined by a specific antigenic determinant, epitope, part, domain (I, II, III and/or IV), subunit or conformation (where applicable) of HER2 against which the amino acid sequences and polypeptides of the invention are directed. For example, the amino acid sequences and polypeptides may or may not be directed against an “interaction site” (as defined herein). However, it is generally assumed and preferred that the amino acid sequences and polypeptides of the invention are preferably at least directed against an interaction site (as defined herein), and in particular against the Herceptin® binding site on HER2 (see Cho et al, (2003), Nature 421:756-760), the Omnitarg binding site on HER2 (see Franklin et al. (2004), Cancer cell 5:317-328), or the Herceptin® binding site and the Omnitarg binding site on HER2.

[0044] An amino acid of the invention that is directed against and/or binds one specific antigenic determinant, or epitope of a target or antigen (such as a specific antigenic determinant, epitope, part, domain (I, II, III and/or IV) or subunit of HER2) while not binding any other antigenic determinant, or epitope of the target or antigen and not binding any other target or antigen, is also referred to herein as monovalent amino acid or monovalent construct of the invention.

[0045] As further described herein, a polypeptide of the invention may contain two or more (monovalent) amino acid sequences or monovalent constructs of the invention that are directed against HER2. Generally, such polypeptides will bind to HER2 with increased avidity compared to a single amino acid sequence of the invention. Such a polypeptide may for example comprise two amino acid sequences of the invention that are directed against the same antigenic determinant, epitope, part, domain, subunit or confirmation (where applicable) of HER2 (which may or may not be an interaction site); or comprise at least one “first” amino acid sequence of the invention that is directed against a first same antigenic determinant, epitope, part, domain, subunit or confirmation (where applicable) of HER2 (which may or may not be an interaction site); and at least one “second” amino acid sequence of the invention that is directed against a second antigenic determinant, epitope, part, domain, subunit or confirmation (where applicable) different from the first (and which again may or may not be an interaction site). Preferably, in such “biparatopic” polypeptides of the invention, at least one amino acid sequence of the invention is directed against an interaction site (as defined herein), although the invention in its broadest sense is not limited thereto.

[0046] Also, when the target is part of a binding pair (for example, a receptor-ligand binding pair), the amino acid sequences and polypeptides may be such that they compete with the cognate binding partner (e.g. the ligand, receptor or other binding partner, as applicable) for binding to the target, and/or such that they (fully or partially) neutralize binding of the binding partner to the target.

[0047] Thus, in one preferred, but non-limiting aspect, the amino acid sequences and polypeptides of the invention are directed against the Herceptin® binding site on HER2 and/or are capable of competing with Herceptin® for binding to HER-2, as determined using a suitable competition assay, such as the assay described in. Example 8. Such amino acid sequences and polypeptides of the invention may be as further defined herein. The amino acid sequences and polypeptides of the invention may in particular be directed against domain IV of HER2. In a preferred aspect, the amino acid sequences and polypeptides of the invention are directed against the C-terminus of domain IV of HER2.

[0048] In another preferred, but non-limiting aspect, the amino acid sequences and polypeptides of the invention are capable, upon binding to HER-2, to (i) recruit immune effector cells such as macrophages and monocytes to the tumor (for this purpose, most preferably a polypeptide of the invention is used that contains an Fc portion that confers upon the polypeptide the ability to recruit immune effector cells such as macrophages and monocytes to the tumor); and/or (ii) modulate (as defined herein) HER-2 or HER-2 mediated signalling by downregulating HER2 levels (for example, as determined by the methodology described in Hudziak et al. 1989, Mol. Cell. Biol 9: 1165) and/or by downregulating HER2-mediated signaling pathways (for example, as determined by the methodology described in Lane et al. 2000, Mol. Cell. Biol. 20: 3210, Motoyama et al. 2002, Cancer Res. 62: 3151); and/or (iii) modulate (as defined herein) HER-2 or HER-2 mediated signalling by blocking or inhibiting metalloproteinase-mediated HER2 ectodomain shedding (for example, as determined by the methodology described in Molina et al. 2001, Cancer Res. 61: 4744); or more generally capable of modulating (as defined herein) HER-2 or HER-2 mediated signalling via the same mechanism of action as Herceptin®. Such amino acid sequences and polypeptides of the invention preferably are directed against the Herceptin® binding site on HER2 and/or capable of competing with Herceptin® for binding to HER-2, and may in particular be directed against domain IV of HER2, and more in particular against the C-terminus of domain IV of HER2 (see also Cho et al. (2003), Nature 421:756-760).

[0049] In another preferred, but non-limiting aspect, the amino acid sequences and polypeptides of the invention are directed against the Omnitarg binding site on HER2 and/or are capable of competing with Omnitarg (and/or with the Omnitarg-Fab used in Example 9) for binding to HER-2, as determined using a suitable competition assay, such as the assay described in Example 9. Such amino acid sequences and polypeptides of the invention may be as further defined herein. The amino acid sequences and polypeptides of the invention may be directed against domain II of HER2. In a preferred aspect, the amino acid sequences and polypeptides of the invention are directed against the center of domain II of HER2.

[0050] In another preferred, but non-limiting aspect, the amino acid sequences and polypeptides of the invention are capable, upon binding to HER-2, to modulate (as defined herein) HER-2 or HER-2 mediated signalling by inhibiting ligand activation of an ErbB hetero-oligomer comprising HER2 and HER3, HERO or EGFR, or more generally capable of modulating (as defined herein) HER-2 or HER-2 mediated signalling via the same mechanism of action as Omnitarg. Such amino acid sequences and polypeptides of the invention preferably are directed against the Omnitarg binding site on HER2 and/or capable of competing with Omnitarg (and/or with the Omnitarg-Fab used in Example 9) for binding to HER-2, and may in particular be directed against domain II of HER2, and more in particular against the middle of domain II of HER2 (see also Franklin et al. (2004), Cancer cell 5:317-328).

[0051] It is also within the scope of the invention that, where applicable, an amino acid sequence or polypeptide of the invention can bind to two or more antigenic determinants, epitopes, parts, domains, subunits or confirmations of HER2. In such a case, the antigenic determinants, epitopes, parts, domains or subunits of HER2 to which the amino acid sequences and/or polypeptides of the invention bind may be essentially the same (for example, if HER2 contains repeated structural motifs or occurs in a multimeric form) or may be different (and in the latter case, the amino acid sequences and polypeptides of the invention may bind to such different antigenic determinants, epitopes, parts, domains, subunits of HER2 with an affinity and/or specificity which may be the same or different).

[0052] In a preferred aspect, the amino acid sequences and (in particular) polypeptides of the invention are capable of binding to two or more different antigenic determinants, epitopes, parts, domains of HER2. In this context, the amino acid sequences and polypeptides of the invention are also referred to as “multiparatopic” (such as e.g. “biparatopic” or “triparatopic”, etc.) amino acid sequences and polypeptides. The multiparatopic amino acid sequences and polypeptides of the invention can be directed against any antigenic determinants, epitopes, parts, and/or domains of HER2.

[0053] For example, and generally, a biparatopic polypeptide of the invention may comprise at least one amino acid sequence of the invention directed against a first antigenic determinant, epitope, part or domain of HER-2 and at least one amino acid sequence of the invention directed against a second antigenic determinant, epitope, part or domain of HER-2 different from the first antigenic determinant, epitope, part or domain (in which said amino acid sequences may be suitably linked, for example via a suitable linker as further described herein). Preferably, such a biparatopic polypeptide of the invention is further such that, when it binds to HER-2, it is capable of simultaneously binding to the first antigenic determinant, epitope, part or domain (i.e. via the at least one amino acid sequence of the invention capable of binding to said first antigenic determinant, epitope, part or domain) and binding to said second antigenic determinant, epitope, part or domain (i.e. via the at least one amino acid sequence of the invention capable of binding to said second antigenic determinant, epitope, part or domain). Examples of such biparatopic polypeptides of the invention will become clear from the further description herein. Also; a triparatopic polypeptide of the invention may comprise at least one further amino acid sequence of the invention directed against a third antigenic determinant, epitope, part or domain of HER-2 (different from both the first and second antigenic determinant, epitope, part or domain), and generally multiparatopic polypeptides of the invention may contain at least two amino acid sequences of the invention directed against at least two different antigenic determinants, epitopes, parts or domains of HER-2. Generally, such biparatopic, triparatopic and multiparatopic polypeptides of the invention may be as further described herein, and the various preferred aspects of the invention as described herein also apply to these biparatopic, triparatopic and multiparatopic polypeptides of the invention (for example, these biparatopic, triparatopic and multiparatopic polypeptides of the invention preferably comprise single variable domains and more preferably Nanobodies).

[0054] In a preferred, but non-limiting aspect, the amino acid sequences and (in particular) polypeptides of the invention are biparatopic (or multiparatopic) and are directed against the Herceptin® binding site on HER2 and/or capable of competing with Herceptin® for binding to HER-2, as well as against at least one other antigenic determinant, epitope, part or domain on HER2. The amino acid sequences and polypeptides of the invention may be directed against domain IV of HER2 as well as against at least one other antigenic determinant, epitope, part or domain on HER2. In a preferred aspect, the amino acid sequences and polypeptides of the invention are directed against the C-terminus of domain IV of HER2 as well as against at least one other antigenic determinant, epitope, part or domain on. HER2. Generally, such a biparatopic (or multiparatopic) polypeptide of the invention will contain at least one amino acid sequence of the invention that is capable of binding to the Herceptin® binding site on HER2 and/or capable of competing with Herceptin® for binding to HER-2 (and in particular against the domain IV of HER-2 and more preferably against the C-terminus of domain IV of HER2), as well as at least one further amino acid sequence of the invention that is capable of binding to at least one other antigenic determinant, epitope, part or domain on HER2. Generally, such biparatopic (or multiparatopic) polypeptides of the invention may be as further described herein, and the various preferred aspects of the invention as described herein also apply to these biparatopic (or multiparatopic) polypeptides of the invention (for example, these biparatopic and multiparatopic polypeptides of the invention may comprise suitable linkers; are preferably such that they can simultaneously bind the Herceptin® binding site and the at least one other antigenic determinant, epitope, part or domain on HER2; and preferably comprise single variable domains and more preferably Nanobodies).

[0055] In another preferred, but non-limiting aspect, the amino acid sequences and (in particular) polypeptides of the invention are biparatopic (or multiparatopic) and are at least capable, upon binding to HER-2, to (i) recruit immune effector cells such as macrophages and monocytes to the tumor (for this purpose, most preferably a polypeptide of the invention is used that contains an Fc portion that confers upon the polypeptide the ability to recruit immune effector cells such as macrophages and monocytes to the tumor); and/or (ii) modulate (as defined herein) HER-2 or HER-2 mediated signalling by downregulating HER2 levels (for example, as determined by the methodology described in Hudziak et al. 1989, Mol. Cell. Biol 9: 1165) and/or by downregulating HER2-mediated signaling pathways (for example, as determined by the methodology described in Lane et al. 2000, Mol. Cell. Biol. 20: 3210, Motoyama et al. 2002, Cancer Res. 62: 3151); and/or (iii) modulate (as defined herein) HER-2 or HER-2 mediated signalling by blocking or inhibiting metalloproteinase-mediated HER2 ectodomain shedding (for example, as determined by the methodology described in Molina et al. 2001, Cancer Res. 61: 4744); or more generally by modulating (as defined herein) HER-2 or HER-2 mediated signalling via the same mechanism of action as Herceptin®.

[0056] Such biparatopic (or multiparatopic) polypeptides of the invention preferably either (a) comprise an Fc portion that confers upon the polypeptide the ability to recruit immune effector cells such as macrophages and monocytes to the tumor), and/or (b) comprise at least one amino acid sequence of the invention that is capable, upon binding to HER-2, to (1) modulate (as defined herein) HER-2 or HER-2 mediated signalling by downregulating HER2 levels and/or by downregulating HER2-mediated signaling pathways; and/or (2) modulate (as defined herein) HER-2 or HER-2 mediated signalling by blocking or inhibiting metalloproteinase-mediated HER2 ectodomain shedding; or more generally (3) modulate (as defined herein) HER-2 or HER-2 mediated signalling via the same mechanism of action as Herceptin®; as well as at least one further amino acid sequence of the invention that is capable of binding to at least one other antigenic determinant, epitope, part or domain on HER2 (i.e. different from the antigenic determinant, epitope, part or domain to which the aforementioned amino acid sequence of the invention can bind). Such biparatopic (or multiparatopic) polypeptides of the invention preferably comprise at least one amino acid sequence of the invention that is directed against the Herceptin® binding site on HER2 and/or capable of competing with Herceptin® for binding to HER-2 (and in particular against domain IV of HER2, and more in particular against the C-terminus of domain IV of HER2), as well as at least one further amino acid sequence of the invention that is capable of binding to at least one other antigenic determinant, epitope, part or domain on HER2. Generally, such biparatopic (or multiparatopic) polypeptides of the invention may be as further described herein, and the various preferred aspects of the invention as described herein also apply to these biparatopic (or multiparatopic) polypeptides of the invention (for example, these biparatopic and multiparatopic polypeptides of the invention may comprise suitable linkers; are preferably such that they can simultaneously bind the Herceptin® binding site and the at least one other antigenic determinant, epitope, part or domain on HER2; and preferably comprise single variable domains and more preferably Nanobodies).

[0057] In another preferred, but non-limiting aspect, the amino acid sequences and polypeptides of the invention are biparatopic (or multiparatopic) and are directed against the Omnitarg binding site on HER2 and/or capable of competing with Omnitarg for binding to HER-2, as well as against at least one other antigenic determinant on HER2. The amino acid sequences and polypeptides of the invention may be directed against domain II of HER2 as well as against at least one other antigenic determinant on HER2. In a preferred aspect, the amino acid sequences and polypeptides of the invention are directed against the center of domain II of HER2 as well as against at least one other antigenic determinant on HER2. Generally, such a biparatopic (or multiparatopic) polypeptide of the invention will contain at least one amino acid sequence of the invention that is capable of binding to the Omnitarg binding site on HER2 and/or capable of competing with Omnitarg for binding to HER-2 (and in particular against the domain II of HER-2 and more preferably against the middle of domain. II of HER2), as well as at least one further amino acid sequence of the invention that is capable of binding to at least one other antigenic determinant, epitope, part or domain on HER2. Generally, such biparatopic (or multiparatopic) polypeptides of the invention may be as further described herein, and the various preferred aspects of the invention as described herein also apply to these biparatopic (or multiparatopic) polypeptides of the invention (for example, these biparatopic and multiparatopic polypeptides of the invention may comprise suitable linkers; are preferably such that they can simultaneously bind the Omnitarg binding site and the at least one other antigenic determinant, epitope, part or domain on HER2; and preferably comprise single variable domains and more preferably Nanobodies).

[0058] In another preferred, but non-limiting aspect, the amino acid sequences and (in particular) polypeptides of the invention are biparatopic (or multiparatopic) and are at least capable, upon binding to HER-2, to modulate (as defined herein) HER-2 or HER-2 mediated signalling by inhibiting ligand activation of an ErbB hetero-oligomer comprising HER2 and HER3, HER4 or EGFR, or more generally capable of modulating (as defined herein) HER-2 or HER-2 mediated signalling via the same mechanism of action as Omnitarg.

[0059] Such biparatopic (or multiparatopic) polypeptides of the invention preferably comprise at least one amino acid sequence of the invention that is capable, upon binding to HER-2, to modulate (as defined herein) HER-2 or HER-2 mediated signalling by inhibiting ligand activation of an ErbB hetero-oligomer comprising HER2 and HER3, HER4 or EGFR, or more generally capable of modulating (as defined herein) HER-2 or HER-2 mediated signalling via the same mechanism of action as Omnitarg; as well as at least one further amino acid sequence of the invention that is capable of binding to at least one other antigenic determinant, epitope, part or domain on HER2 (i.e. different from the antigenic determinant, epitope, part or domain to which the aforementioned amino acid sequence of the invention can bind). Such biparatopic (or multiparatopic) polypeptides of the invention preferably comprise at least one amino acid sequence of the invention that is directed against the Omnitarg binding site on HER2 and/or capable of competing with Omnitarg for binding to HER-2 (and in particular against domain II of HER2, and more in particular against the middle of domain II of HER2), as well as at least one further amino acid sequence of the invention that is capable of binding to at least one other antigenic determinant, epitope, part or domain on HER2. Generally, such biparatopic (or multiparatopic) polypeptides of the invention may be as further described herein, and the various preferred aspects of the invention as described herein also apply to these biparatopic (or multiparatopic) polypeptides of the invention (for example, these biparatopic and multiparatopic polypeptides of the invention may comprise suitable linkers; are preferably such that they can simultaneously bind the Omnitarg binding site and the at least one other antigenic determinant, epitope, part or domain on HER2; and preferably comprise single variable domains and more preferably Nanobodies).

[0060] In another preferred, but non-limiting aspect, the amino acid sequences and (in particular) polypeptides of the invention are biparatopic and are at least directed against the Herceptin® binding site on HER2 as well as against the Omnitarg binding site on HER2. The amino acid sequences and polypeptides of the invention may be directed against domain IV of HER2. The amino acid sequences and polypeptides of the invention may be directed against domain II of HER2. The amino acid sequences and polypeptides of the invention may be directed against domain IV of HER2 as well as against domain II of HER2. In a preferred aspect, the amino acid sequences and polypeptides of the invention are directed against the C-terminus of domain IV of HER2. In another preferred aspect, the amino acid sequences and polypeptides of the invention are directed against the C-terminus of domain IV of HER2 as well as against domain H of HER2. In another preferred aspect, the amino acid sequences and polypeptides of the invention are directed against the center of domain II of HER2. In another preferred aspect, the amino acid sequences and polypeptides of the invention are directed against domain IV of HER2 as well as against the center of domain II of HER2. In another preferred aspect, the amino acid sequences and polypeptides of the invention are directed against the C-terminus of domain IV of HER2 as well as against the center of domain II of HER2.

[0061] Again, the above biparatopic (or multiparatopic) polypeptides of the invention may be as further described herein, and the various preferred aspects of the invention as described herein also apply to these biparatopic (or multiparatopic) polypeptides of the invention (for example, these biparatopic and multiparatopic polypeptides of the invention may comprise suitable linkers; are preferably such that they can simultaneously bind the Omnitarg binding site and the Herceptin®-binding site; and preferably comprise single variable domains and more preferably Nanobodies).

[0062] In another preferred, but non-limiting aspect, the amino acid sequences and (in particular) polypeptides of the invention are biparatopic with both paratopes directed against the Herceptin® binding site on HER2. The amino acid sequences and polypeptides of the invention may be directed against domain IV of HER2 (one paratope or both paratopes). In a preferred aspect, the amino acid sequences and polypeptides of the invention are directed against the C-terminus of domain IV of HER2 (one paratope or both paratopes).

[0063] In another preferred, but non-limiting aspect, the amino acid sequences and (in particular) polypeptides of the invention are biparatopic with both paratopes directed against the Omnitarg binding site on HER2. The amino acid sequences and polypeptides of the invention may be directed against domain. II of HER2 (one paratope or both paratopes). In a preferred aspect, the amino acid sequences and polypeptides of the invention are directed against the center of domain. II of HER2 (one paratope or both paratopes).

[0064] Again, the above biparatopic (or multiparatopic) polypeptides of the invention may be as further described herein, and the various preferred aspects of the invention as described herein also apply to these biparatopic (or multiparatopic) polypeptides of the invention (for example, these biparatopic and multiparatopic polypeptides of the invention may comprise suitable linkers; are preferably such that they can simultaneously bind both binding sites; and preferably comprise single variable domains and more preferably Nanobodies).

[0065] In another preferred, but non-limiting aspect, the amino acid sequences and (in particular) polypeptides of the invention are biparatopic (or multiparatopic) and are at least capable, upon binding to HER-2, (A) to modulate (as defined herein) HER-2 or HER-2 mediated signalling by inhibiting ligand activation of an ErbB hetero-oligomer comprising HER2 and HER3, HER4 or EGFR, or more generally capable of modulating (as defined herein) HER-2 or HER-2 mediated signalling via the same mechanism of action as Omnitarg; and (B) to (i) recruit immune effector cells such as macrophages and monocytes to the tumor (for this purpose, most preferably a polypeptide of the invention is used that contains an Fc portion that confers upon the polypeptide the ability to recruit immune effector cells such as macrophages and monocytes to the tumor); and/or (ii) modulate (as defined herein) HER-2 or HER-2 mediated signalling by downregulating HER2 levels and/or by down-regulating HER2-mediated signaling pathways; and/or (iii) modulate (as defined herein) HER-2 or HER-2 mediated signalling by blocking or inhibiting metalloproteinase-mediated HER2 ectodomain shedding; or more generally by modulating (as defined herein) HER-2 or HER-2 mediated signalling via the same mechanism of action as Herceptin®.

[0066] For example, for this purpose, such a biparatopic (or multiparatopic) polypeptide of the invention may comprise
[0067] at least one first amino acid sequence of the invention that is capable, upon binding to HER-2, to modulate (as defined herein) HER-2 or HER-2 mediated signalling by inhibiting ligand activation of an ErbB hetero-oligomer comprising HER2 and HER3, HER4 or EGFR, or more generally capable of modulating (as defined herein) HER-2 or HER-2 mediated signalling via the same mechanism of action as Omnitarg. Such an amino acid sequence of the invention is preferably an amino acid sequence that is directed against the Omnitarg binding site on HER2 (and in particular against domain II of HER2, and more in particular against the middle of domain II of HER2) and/or capable of competing with Omnitarg for binding to HER-2;
   and further comprise either
[0068] an Fc portion that confers upon the polypeptide the ability to recruit immune effector cells such as macrophages and monocytes to the tumor),
   and/or
[0069] at least one amino acid sequence of the invention that is capable, upon binding to HER-2, to (1) modulate (as defined herein) HER-2 or HER-2 mediated signalling by downregulating HER2 levels and/or by downregulating HER2-mediated signaling pathways; and/or (2) modulate (as defined herein) HER-2 or HER-2 mediated signalling by blocking or inhibiting metalloproteinase-mediated HER2 ectodomain shedding; or more generally (3) modulate (as defined herein) HER-2 or HER-2 mediated signalling via the same mechanism of action as Herceptin®. Such an amino acid sequence of the invention is preferably an amino acid sequence that is directed against the Herceptin® binding site on HER2 (and in particular against domain IV of HER2, and more in particular against the C-terminus of domain IV of HER2) and/or capable of competing with Herceptin® for binding to HER-2.

[0070] Again, such a biparatopic (or multiparatopic) polypeptide of the invention may be as further described herein, and the various preferred aspects of the invention as described herein also apply to these biparatopic (or multiparatopic) polypeptides of the invention (for example, these biparatopic and multiparatopic polypeptides of the invention may comprise suitable linkers; are preferably such that they can simultaneously bind at least two different antigenic determinants, epitopes, parts or domains or HER-2, such as the Omnitarg binding site and the Herceptin®-binding site; and preferably comprise single variable domains and more preferably Nanobodies).

[0071] In another preferred, but non-limiting aspect, the amino acid sequences and (in particular) polypeptides of the invention are biparatopic (or multiparatopic) and are at least capable, upon binding to HER-2, (A) to modulate (as defined herein) HER-2 or HER-2 mediated signalling by inhibiting ligand activation of an ErbB hetero-oligomer comprising HER2 and HER3, HER4 or EGFR, or more generally capable of modulating (as defined herein) HER-2 or HER-2 mediated signalling via the same mechanism of action as Omnitarg; and (B) to bind to the Herceptin® binding site on HER2 (and in particular to domain IV of HER2, and more in particular to the C-terminus of domain IV of HER2) and/or to compete with Herceptin® for binding to HER-2.

[0072] For example, for this purpose, such a biparatopic (or multiparatopic) polypeptide of the invention may comprise
[0073] at least one first amino acid sequence of the invention that is capable, upon binding to HER-2, to modulate (as defined herein) HER-2 or HER-2 mediated signalling by inhibiting ligand activation of an ErbB hetero-oligomer comprising HER2 and HER3, HER4 or EGFR, or more generally capable of modulating (as defined herein) HER-2 or HER-2 mediated signalling via the same mechanism of action as Omnitarg;
   and further comprise either
[0074] at least one amino acid sequence of the invention that is directed against the Herceptin® binding site on HER2 (and in particular against domain IV of HER2, and more in particular against the C-terminus of domain IV of HER2) and/or capable of competing with Herceptin® for binding to HER-2.

[0075] Again, such a biparatopic (or multiparatopic) polypeptide of the invention may be as further described herein, and the various preferred aspects of the invention as described herein also apply to these biparatopic (or multiparatopic) polypeptides of the invention (for example, these biparatopic and multiparatopic polypeptides of the invention may comprise suitable linkers; are preferably such that they can simultaneously bind at least two different antigenic determinants, epitopes, parts or domains or HER-2, at least including the Herceptin®-binding site; and preferably comprise single variable domains and more preferably Nanobodies).

[0076] In another preferred, but non-limiting aspect, the amino acid sequences and (in particular) polypeptides of the invention are biparatopic (or multiparatopic) and are at least capable, upon binding to HER-2, (A) to bind to the Omnitarg binding site on HER2 (and in particular to domain II of HER2, and more in particular to the middle of domain II of HER2) and/or capable of competing with Omnitarg for binding to HER-2; and (B) to (i) recruit immune effector cells such as macrophages and monocytes to the tumor (for this purpose, most preferably a polypeptide of the invention is used that contains an Fc portion that confers upon the polypeptide the ability to recruit immune effector cells such as macrophages and monocytes to the tumor); and/or (ii) modulate (as defined herein) HER-2 or HER-2 mediated signalling by downregulating HER2 levels and/or by downregulating HER2-mediated signaling pathways; and/or (iii) modulate (as defined herein) HER-2 or HER-2 mediated signalling by blocking or inhibiting metalloproteinase-mediated HER2 ectodomain shedding; or more generally by modulating (as defined herein) HER-2 or HER-2 mediated signalling via the same mechanism of action as Herceptin®.

[0077] For example, for this purpose, such a biparatopic (or multiparatopic) polypeptide of the invention may comprise:
[0078] at least one first amino acid sequence of the invention that is directed against the Omnitarg binding site on HER2 (and in particular against domain II of HER2, and more in particular against the middle of domain II of HER2) and/or capable of competing with Omnitarg for binding to HER-2;
   and further comprise either
[0079] an Fc portion that confers upon the polypeptide the ability to recruit immune effector cells such as macrophages and monocytes to the tumor),
   and/or
[0080] at least one amino acid sequence of the invention that is capable, upon binding to HER-2, to (1) modulate (as defined herein) HER-2 or HER-2 mediated signalling by downregulating HER2 levels and/or by downregulating HER2-mediated signaling pathways; and/or (2) modulate (as defined herein) HER-2 or HER-2 mediated signalling by blocking or inhibiting metalloproteinase-mediated HER2 ectodomain shedding; or more generally (3) modulate (as defined herein) HER-2 or HER-2 mediated signalling via the same mechanism of action as Herceptin®. Such an amino acid sequence of the invention is preferably an amino acid sequence that is directed against the Herceptin® binding site on HER2 (and in particular against domain IV of HER2, and more in particular against the C-terminus of domain IV of HER2) and/or capable of competing with Herceptin® for binding to HER-2.

[0081] Again, such a biparatopic (or multiparatopic) polypeptide of the invention may be as further described herein, and the various preferred aspects of the invention as described herein also apply to these biparatopic (or multiparatopic) polypeptides of the invention (for example, these biparatopic and multiparatopic polypeptides of the invention may comprise suitable linkers; are preferably such that they can simultaneously bind at least two different antigenic determinants, epitopes, parts or domains or HER-2, at least including the Omnitarg binding site; and preferably comprise single variable domains and more preferably Nanobodies).

[0082] It is also expected that the amino acid sequences and polypeptides of the invention will generally bind to all naturally occurring or synthetic analogs, variants, mutants, alleles, parts and fragments of HER2; or at least to those analogs, variants, mutants, alleles, parts and fragments of HER2 that contain one or more antigenic determinants or epitopes that are essentially the same as the antigenic determinant(s) or epitope(s) to which the amino acid sequences and polypeptides of the invention bind in HER2 (e.g. in wild-type HER2). Again, in such a case, the amino acid sequences and polypeptides of the invention may bind to such analogs, variants, mutants, alleles, parts and fragments with an affinity and/or specificity that are the same as, or that are different from (i.e. higher than or lower than), the affinity and specificity with which the amino acid sequences of the invention bind to (wild-type) HER2. It is also included within the scope of the invention that the amino acid sequences and polypeptides of the invention bind to some analogs, variants, mutants, alleles, parts and fragments of HER2, but not to others.

[0083] When HER2 exists in a monomeric form and in one or more multimeric forms, it is within the scope of the invention that the amino acid sequences and polypeptides of the invention only bind to HER2 in monomeric form, only bind to HER2 in multimeric form, or bind to both the monomeric and the multimeric form. Again, in such a case, the amino acid sequences and polypeptides of the invention may bind to the monomeric form with an affinity and/or specificity that are the same as, or that are different from (i.e. higher than or lower than), the affinity and specificity with which the amino acid sequences of the invention bind to the multimeric form.

[0084] In a non-limiting aspect, the amino acid sequences and polypeptides of the invention only bind to HER2 in monomeric form while not binding to HER2 in dimerized state. In another non-limiting aspect, the amino acid sequences and polypeptides of the invention only bind to HER2 in dimerized state while not binding to HER2 in monomeric form. In another non-limiting aspect, the amino acid sequences and polypeptides of the invention bind to HER2 in monomeric form as well as to HER2 in dimerized state.

[0085] Also, when HER2 can associate with other proteins or polypeptides (e.g. with other ERBB receptors, also referred to as heterodimerization) to form protein complexes (e.g. with multiple subunits), it is within the scope of the invention that the amino acid sequences and polypeptides of the invention bind to HER2 in its non-associated state, bind HER2 in its associated state, or bind to both. In a non-limiting aspect, the amino acid sequences and polypeptides of the invention only bind to HER2 when HER-2 is in its monomeric form while not binding to HER2 when HER-2 is in its dimerized state. In another non-limiting aspect, the amino acid sequences and polypeptides of the invention only bind to HER2 when HER-2 is in its dimerized state while not binding to HER2 when HER-2 is in monomeric form. In another non-limiting aspect, the amino acid sequences and polypeptides of the invention bind to HER2 in monomeric form as well as to HER2 in dimerized state. In all these cases, the amino acid sequences and polypeptides of the invention may bind to such multimers or associated protein complexes with an affinity and/or specificity that may be the same as or different from (i.e. higher than or lower than) the affinity and/or specificity with which the amino acid sequences and polypeptides of the invention bind to HER2 in its monomeric and non-associated state.

[0086] Also, as will be clear to the skilled person, proteins or polypeptides that contain two or more amino acid sequences directed against HER2 may bind with higher avidity to HER2 than the corresponding monomeric amino acid sequence(s). For example, and without limitation, proteins or polypeptides that contain two or more amino acid sequences directed against different epitopes of HER2 may (and usually will) bind with higher avidity than each of the different monomers, and proteins or polypeptides that contain two or more amino acid sequences directed against HER2 may (and usually will) bind also with higher avidity to a multimer of HER2.

[0087] Generally, amino acid sequences and polypeptides of the invention will at least bind to those forms of HER2 (including monomeric, multimeric and associated forms) that are the most relevant from a biological and/or therapeutic point of view, as will be clear to the skilled person.

[0088] It is also within the scope of the invention to use parts, fragments, analogs, mutants, variants, alleles and/or derivatives of the amino acid sequences and polypeptides of the invention, and/or to use proteins or polypeptides comprising or essentially consisting of one or more of such parts, fragments, analogs, mutants, variants, alleles and/or derivatives, as long as these are suitable for the uses envisaged herein. Such parts, fragments, analogs, mutants, variants, alleles and/or derivatives will usually contain (at least part of) a functional antigen-binding site for binding against HER2; and more preferably will be capable of specific binding to HER2, and even more preferably capable of binding to HER2 with an affinity (suitably measured and/or expressed as a K_{D}-value (actual or apparent), a K_{A}-value (actual or apparent), a kₒₙ-rate and/or a k_{off}-rate, or alternatively as an IC₅₀ value, as further described herein) that is as defined herein. Some non-limiting examples of such parts, fragments, analogs, mutants, variants, alleles, derivatives, proteins and/or polypeptides will become clear from the further description herein. Additional fragments or polypeptides of the invention may also be provided by suitably combining (i.e. by linking or genetic fusion) one or more (smaller) parts or fragments as described herein.

[0089] In one specific, but non-limiting aspect of the invention, which will be further described herein, such analogs, mutants, variants, alleles, derivatives have an increased half-life in serum (as further described herein) compared to the amino acid sequence from which they have been derived. For example, an amino acid sequence of the invention may be linked (chemically or otherwise) to one or more groups or moieties that extend the half-life (such as PEG), so as to provide a derivative of an amino acid sequence of the invention with increased half-life.

[0090] In one specific, but non-limiting aspect, the amino acid sequence of the invention may be an amino acid sequence that comprises an immunoglobulin fold or may be an amino acid sequence that, under suitable conditions (such as physiological conditions) is capable of forming an immunoglobulin fold (i.e. by folding). Reference is inter alia made to the review by Halaby et al., J. (1999) Protein Eng. 12, 563-71. Preferably, when properly folded so as to form an immunoglobulin fold, such an amino acid sequence is capable of specific binding (as defined herein) to HER2; and more preferably capable of binding to HER2 with an affinity (suitably measured and/or expressed as a K_{D}-value (actual or apparent), a K_{A}-value (actual or apparent), a kₒₙ-rate and/or a k_{off}-rate, or alternatively as an IC₅₀ value, as further described herein) that is as defined herein. Also, parts, fragments, analogs, mutants, variants, alleles and/or derivatives of such amino acid sequences are preferably such that they comprise an immunoglobulin fold or are capable for forming, under suitable conditions, an immunoglobulin fold.

[0091] In particular, but without limitation, the amino acid sequences of the invention may be amino acid sequences that essentially consist of 4 framework regions (FR1 to FR4 respectively) and 3 complementarity determining regions (CDR1 to CDR3 respectively); or any suitable fragment of such an amino acid sequence (which will then usually contain at least some of the amino acid residues that form at least one of the CDR's, as further described herein).

[0092] The amino acid sequences of the invention may in particular be an immunoglobulin sequence or a suitable fragment thereof, and more in particular be an immunoglobulin variable domain sequence or a suitable fragment thereof, such as light chain variable domain sequence (e.g. a V_{L}-sequence) or a suitable fragment thereof; or a heavy chain variable domain sequence (e.g. a V_{H}-sequence) or a suitable fragment thereof. When the amino acid sequence of the invention is a heavy chain variable domain sequence, it may be a heavy chain variable domain sequence that is derived from a conventional four-chain antibody (such as, without limitation, a V_{H} sequence that is derived from a human antibody) or be a so-called. V_{HH}-sequence (as defined herein) that is derived from a so-called “heavy chain antibody” (as defined herein).

[0093] However, it should be noted that the invention is not limited as to the origin of the amino acid sequence of the invention (or of the nucleotide sequence of the invention used to express it), nor as to the way that the amino acid sequence or nucleotide sequence of the invention is (or has been) generated or obtained. Thus, the amino acid sequences of the invention may be naturally occurring amino acid sequences (from any suitable species) or synthetic or semi-synthetic amino acid sequences. In a specific but non-limiting aspect of the invention, the amino acid sequence is a naturally occurring immunoglobulin sequence (from any suitable species) or a synthetic or semi-synthetic immunoglobulin sequence, including but not limited to “humanized” (as defined herein) immunoglobulin sequences (such as partially or fully humanized mouse or rabbit immunoglobulin sequences, and in particular partially or fully humanized V_{HH} sequences or Nanobodies), “camelized” (as defined herein) immunoglobulin sequences, as well as immunoglobulin sequences that have been obtained by techniques such as affinity maturation (for example, starting from synthetic, random or naturally occurring immunoglobulin sequences), CDR grafting, veneering, combining fragments derived from different immunoglobulin sequences, PCR assembly using overlapping primers, and similar techniques for engineering immunoglobulin sequences well known to the skilled person; or any suitable combination of any of the foregoing. Reference is for example made to the standard handbooks, as well as to the further description and prior art mentioned herein.

[0094] Similarly, the nucleotide sequences of the invention may be naturally occurring nucleotide sequences or synthetic or semi-synthetic sequences, and may for example be sequences that are isolated by PCR from a suitable naturally occurring template (e.g. DNA or RNA isolated from a cell), nucleotide sequences that have been isolated from a library (and in particular, an expression library), nucleotide sequences that have been prepared by introducing mutations into a naturally occurring nucleotide sequence (using any suitable technique known per se, such as mismatch PCR), nucleotide sequence that have been prepared by PCR using overlapping primers, or nucleotide sequences that have been prepared using techniques for DNA synthesis known per se.

[0095] The amino acid sequence of the invention may in particular be a domain antibody (or an amino acid sequence that is suitable for use as a domain antibody), a single domain antibody (or an amino acid sequence that is suitable for use as a single domain antibody), a “dAb” (or an amino acid sequence that is suitable for use as a dAb) or a Nanobody® (as defined herein, and including but not limited to a V_{HH} sequence); other single variable domains, or any suitable fragment of any one thereof. For a general description of (single) domain antibodies, reference is also made to the prior art cited above, as well as to EP 0 368 684. For the term “dAb's”, reference is for example made to Ward et al. (Nature 1989 Oct. 12; 341 (6242): 544-6), to Holt et al., Trends Biotechnol., 2003, 21(11):484-490; as well as to for example WO 06/030220, WO 06/003388 and other published patent applications of Domantis Ltd. It should also be noted that, although less preferred in the context of the present invention because they are not of mammalian origin, single domain antibodies or single variable domains can be derived from certain species of shark (for example, the so-called “IgNAR domains”, see for example WO 05/18629).

[0096] In particular, the amino acid sequence of the invention may be a Nanobody® (as defined herein) or a suitable fragment thereof. [Note: Nanobody®, Nanobodies® and Nanoclone® are registered trademarks of Ablynx N.V.] Such Nanobodies directed against HER2 will also be referred to herein as “Nanobodies of the invention”.

[0097] For a general description of Nanobodies, reference is made to the further description below, as well as to the prior art cited herein. In this respect, it should however be noted that this description and the prior art mainly described Nanobodies of the so-called “V_{H}3 class” (i.e. Nanobodies with a high degree of sequence homology to human germline sequences of the V_{H}3 class such as DP-47, DP-51 or DP-29), which Nanobodies form a preferred aspect of this invention. It should however be noted that the invention in its broadest sense generally covers any type of Nanobody directed against HER2, and for example also covers the Nanobodies belonging to the so-called “V_{H}4 class” (i.e. Nanobodies with a high degree of sequence homology to human germline sequences of the V_{H}4 class such as DP-78), as for example described in WO 07/118,670.

[0098] Generally, Nanobodies (in particular V_{HH} sequences and partially humanized Nanobodies) can in particular be characterized by the presence of one or more “Hallmark residues” (as described herein) in one or more of the framework sequences (again as further described herein).

[0099] Thus, generally, a Nanobody can be defined as an amino acid sequence with the (general) structure
[0100] FR1-CDR1-FR2-CDR2-FR3-CDR3-FR4
   in which FR1 to FR4 refer to framework regions 1 to 4, respectively, and in which CDR1 to CDR3 refer to the complementarity determining regions 1 to 3, respectively, and in which one or more of the Hallmark residues are as further defined herein.

[0101] In particular, a Nanobody can be an amino acid sequence with the (general) structure
[0102] FR1-CDR1-FR2-CDR2-FR3-CDR3-FR4
   in which FR1 to FR4 refer to framework regions 1 to 4, respectively, and in which CDR1 to CDR3 refer to the complementarity determining regions 1 to 3, respectively, and in which the framework sequences are as further defined herein.

[0103] More in particular, a Nanobody can be an amino acid sequence with the (general) structure
[0104] FR1-CDR1-FR2-CDR2-FR3-CDR3-FR4
   in which FR1 to FR4 refer to framework regions 1 to 4, respectively, and in which CDR1 to CDR3 refer to the complementarity determining regions 1 to 3, respectively, and in which:
[0105] i) preferably one or more of the amino acid residues at positions 11, 37, 44, 45, 47, 83, 84, 103, 104 and 108 according to the Kabat numbering are chosen from the Hallmark residues mentioned in Table A-3 below;
   and in which:
[0106] ii) said amino acid sequence has at least 80% amino acid identity with at least one of the amino acid sequences of SEQ ID NOs: 1 to 22, in which for the purposes of determining the degree of amino acid identity, the amino acid residues that form the CDR sequences (indicated with X in the sequences of SEQ ID NOs: 1 to 22) are disregarded.

[0107] In these Nanobodies, the CDR sequences are generally as further defined herein.

[0108] Thus, the invention also relates to such Nanobodies that can bind to (as defined herein) and/or are directed against HER2, to suitable fragments thereof, as well as to polypeptides that comprise or essentially consist of one or more of such Nanobodies and/or suitable fragments.

[0109] SEQ ID NOs: 2051-2325 give the amino acid sequences of a number of V_{HH} sequences that have been raised against HER2.

[0110] In particular, the invention in some specific aspects provides:
[0111] amino acid sequences that are directed against (as defined herein) HER2 and that have at least 80%, preferably at least 85%, such as 90% or 95% or more sequence identity with at least one of the amino acid sequences of SEQ ID NO's: 2051-2325. These amino acid sequences may further be such that they are directed against an interaction site (as defined herein) on HER2 (such as the Herceptin® or Omnitarg binding site);
[0112] amino acid sequences that cross-block (as defined herein) the binding of at least one of the amino acid sequences of SEQ ID NO's: 2051-2325 to HER2 and/or that compete with at least one of the amino acid sequences of SEQ ID NO's: 2051-2325 for binding to HER2. Again, these amino acid sequences may further be such that they are directed against an interaction site (as defined herein) on HER2 (such as Herceptin® or Omnitarg binding site);

[0113] which amino acid sequences may be as further described herein (and may for example be Nanobodies); as well as polypeptides of the invention that comprise one or more of such amino acid sequences (which may be as further described herein, and may for example be bispecific and/or biparatopic polypeptides as described herein), and nucleic acid sequences that encode such amino acid sequences and polypeptides. Such amino acid sequences and polypeptides do not include any naturally occurring ligands.

[0114] Accordingly, some particularly preferred Nanobodies of the invention are Nanobodies which can bind (as further defined herein) to and/or are directed against to HER2 and which:
[0115] i) have at least 80% amino acid identity with at least one of the amino acid sequences of SEQ ID NOs: 2051-2325, in which for the purposes of determining the degree of amino acid identity, the amino acid residues that form the CDR sequences are disregarded. In this respect, reference is also made to Table A-1, which lists the framework 1 sequences (SEQ ID NOs: 126-400), framework 2 sequences (SEQ ID NOs: 676-950), framework 3 sequences (SEQ ID NOs: 1226-1500) and framework 4 sequences (SEQ ID NOs: 1776-2050) of the Nanobodies of SEQ ID NOs: 2051-2325 (with respect to the amino acid residues at positions 1 to 4 and 27 to 30 of the framework 1 sequences, reference is also made to the comments made below. Thus, for determining the degree of amino acid identity, these residues are preferably disregarded);
   and in which:
[0116] ii) preferably one or more of the amino acid residues at positions 11, 37, 44, 45, 47, 83, 84, 103, 104 and 108 according to the Kabat numbering are chosen from the Hallmark residues mentioned in Table A-3 below.

[0117] In these Nanobodies, the CDR sequences are generally as further defined herein.

[0118] Again, such Nanobodies may be derived in any suitable manner and from any suitable source, and may for example be naturally occurring V_{HH} sequences (i.e. from a suitable species of Camelid) or synthetic or semi-synthetic amino acid sequences, including but not limited to “humanized” (as defined herein) Nanobodies, “camelized” (as defined herein) immunoglobulin sequences (and in particular camelized heavy chain variable domain sequences), as well as Nanobodies that have been obtained by techniques such as affinity maturation (for example, starting from synthetic, random or naturally occurring immunoglobulin sequences), CDR grafting, veneering, combining fragments derived from different immunoglobulin sequences, PCR assembly using overlapping primers, and similar techniques for engineering immunoglobulin sequences well known to the skilled person; or any suitable combination of any of the foregoing as further described herein. Also, when a Nanobody comprises a V_{HH} sequence, said Nanobody may be suitably humanized, as further described herein, so as to provide one or more further (partially or fully) humanized Nanobodies of the invention. Similarly, when a Nanobody comprises a synthetic or semi-synthetic sequence (such as a partially humanized sequence), said Nanobody may optionally be further suitably humanized, again as described herein, again so as to provide one or more further (partially or fully) humanized Nanobodies of the invention.

[0119] In particular, humanized Nanobodies may be amino acid sequences that are as generally defined for Nanobodies in the previous paragraphs, but in which at least one amino acid residue is present (and in particular, in at least one of the framework residues) that is and/or that corresponds to a humanizing substitution (as defined herein). Some preferred, but non-limiting humanizing substitutions (and suitable combinations thereof) will become clear to the skilled person based on the disclosure herein. In addition, or alternatively, other potentially useful humanizing substitutions can be ascertained by comparing the sequence of the framework regions of a naturally occurring V_{HH} sequence with the corresponding framework sequence of one or more closely related human V_{H} sequences, after which one or more of the potentially useful humanizing substitutions (or combinations thereof) thus determined can be introduced into said sequence (in any manner known per se, as further described herein) and the resulting humanized V_{HH} sequences can be tested for affinity for the target, for stability, for ease and level of expression, and/or for other desired properties. In this way, by means of a limited degree of trial and error, other suitable humanizing substitutions (or suitable combinations thereof) can be determined by the skilled person based on the disclosure herein. Also, based on the foregoing, (the framework regions of) a Nanobody may be partially humanized or fully humanized.

[0120] Some particularly preferred humanized Nanobodies of the invention are humanized variants of the Nanobodies of SEQ ID NOs: 2051-2325.

[0121] Thus, some other preferred Nanobodies of the invention are Nanobodies which can bind (as further defined herein) to HER2 and which:
[0122] i) are a humanized variant of one of the amino acid sequences of SEQ ID NOs: 2051-2325; and/or
[0123] ii) have at least 80% amino acid identity with at least one of the amino acid sequences of SEQ ID NOs: 2051-2325, in which for the purposes of determining the degree of amino acid identity, the amino acid residues that form the CDR sequences are disregarded;
   and in which:
[0124] i) preferably one or more of the amino acid residues at positions 11, 37, 44, 45, 47, 83, 84, 103, 104 and 108 according to the Kabat numbering are chosen from the Hallmark residues mentioned in Table A-3 below.

[0125] According to another specific aspect of the invention, the invention provides a number of stretches of amino acid residues (i.e. small peptides) that are particularly suited for binding to HER2. These stretches of amino acid residues may be present in, and/or may be corporated into, an amino acid sequence of the invention, in particular in such a way that they form (part of) the antigen binding site of an amino acid sequence of the invention. As these stretches of amino acid residues were first generated as CDR sequences of heavy chain antibodies or V_{HH} sequences that were raised against HER2 (or may be based on and/or derived from such CDR sequences, as further described herein), they will also generally be referred to herein as “CDR sequences” (i.e. as CDR1 sequences, CDR2 sequences and CDR3 sequences, respectively). It should however be noted that the invention in its broadest sense is not limited to a specific structural role or function that these stretches of amino acid residues may have in an amino acid sequence of the invention, as long as these stretches of amino acid residues allow the amino acid sequence of the invention to bind to HER2. Thus, generally, the invention in its broadest sense comprises any amino acid sequence that is capable of binding to HER2 and that comprises one or more CDR sequences as described herein, and in particular a suitable combination of two or more such CDR sequences, that are suitably linked to each other via one or more further amino acid sequences, such that the entire amino acid sequence forms a binding domain and/or binding unit that is capable of binding to HER2. It should however also be noted that the presence of only one such CDR sequence in an amino acid sequence of the invention may by itself already be sufficient to provide an amino acid sequence of the invention that is capable of binding to HER2; reference is for example again made to the so-called “Expedite fragments” described in WO 03/050531.

[0126] Thus, in another specific, but non-limiting aspect, the amino acid sequence of the invention may be an amino acid sequence that comprises at least one amino acid sequence that is chosen from the group consisting of the CDR1 sequences, CDR2 sequences and CDR3 sequences that are described herein (or any suitable combination thereof). In particular, an amino acid sequence of the invention may be an amino acid sequence that comprises at least one antigen binding site, wherein said antigen binding site comprises at least one amino acid sequence that is chosen from the group consisting of the CDR1 sequences, CDR2 sequences and CDR3 sequences that are described herein (or any suitable combination thereof).

[0127] Generally, in this aspect of the invention, the amino acid sequence of the invention may be any amino acid sequence that comprises at least one stretch of amino acid residues, in which said stretch of amino acid residues has an amino acid sequence that corresponds to the sequence of at least one of the CDR sequences described herein. Such an amino acid sequence may or may not comprise an immunoglobulin fold. For example, and without limitation, such an amino acid sequence may be a suitable fragment of an immunoglobulin sequence that comprises at least one such CDR sequence, but that is not large enough to form a (complete) immunoglobulin fold (reference is for example again made to the “Expedite fragments” described in WO 03/050531). Alternatively, such an amino acid sequence may be a suitable “protein scaffold” that comprises least one stretch of amino acid residues that corresponds to such a CDR sequence (i.e. as part of its antigen binding site). Suitable scaffolds for presenting amino acid sequences will be clear to the skilled person, and for example comprise, without limitation, to binding scaffolds based on or derived from immunoglobulins (i.e. other than the immunoglobulin sequences already described herein), protein scaffolds derived from protein A domains (such as Affibodies™), tendamistat, fibronectin, lipocalin, CTLA-4, T-cell receptors, designed ankyrin repeats, avimers and PDZ domains (Binz et al., Nat. Biotech 2005, Vol 23:1257), and binding moieties based on DNA or RNA including but not limited to DNA or RNA aptamers (Ulrich et al., Comb Chem High Throughput Screen 2006 9(8):619-32).

[0128] Again, any amino acid sequence of the invention that comprises one or more of these CDR sequences is preferably such that it can specifically bind (as defined herein) to HER2, and more in particular such that it can bind to HER2 with an affinity (suitably measured and/or expressed as a K_{D}-value (actual or apparent), a K_{A}-value (actual or apparent), a kₒₙ-rate and/or a k_{off}-rate, or alternatively as an IC₅₀ value, as further described herein), that is as defined herein.

[0129] More in particular, the amino acid sequences according to this aspect of the invention may be any amino acid sequence that comprises at least one antigen binding site, wherein said antigen binding site comprises at least two amino acid sequences that are chosen from the group consisting of the CDR1 sequences described herein, the CDR2 sequences described herein and the CDR3 sequences described herein, such that (i) when the first amino acid sequence is chosen from the CDR1 sequences described herein, the second amino acid sequence is chosen from the CDR2 sequences described herein or the CDR3 sequences described herein; (ii) when the first amino acid sequence is chosen from the CDR2 sequences described herein, the second amino acid sequence is chosen from the CDR1 sequences described herein or the CDR3 sequences described herein; or (iii) when the first amino acid sequence is chosen from the CDR3 sequences described herein, the second amino acid sequence is chosen from the CDR 1 sequences described herein or the CDR3 sequences described herein.

[0130] Even more in particular, the amino acid sequences of the invention may be amino acid sequences that comprise at least one antigen binding site, wherein said antigen binding site comprises at least three amino acid sequences that are chosen from the group consisting of the CDR1 sequences described herein, the CDR2 sequences described herein and the CDR3 sequences described herein, such that the first amino acid sequence is chosen from the CDR1 sequences described herein, the second amino acid sequence is chosen from the CDR2 sequences described herein, and the third amino acid sequence is chosen from the CDR3 sequences described herein. Preferred combinations of CDR1, CDR2 and CDR3 sequences will become clear from the further description herein. As will be clear to the skilled person, such an amino acid sequence is preferably an immunoglobulin sequence (as further described herein), but it may for example also be any other amino acid sequence that comprises a suitable scaffold for presenting said CDR sequences.

[0131] Thus, in one specific, but non-limiting aspect, the invention relates to an amino acid sequence directed against HER2, that comprises one or more stretches of amino acid residues chosen from the group consisting of:
[0132] a) the amino acid sequences of SEQ ID NO's: 401-675;
[0133] b) amino acid sequences that have at least 80% amino acid identity with at least one of the amino acid sequences of SEQ ID NO's: 401-675;
[0134] c) amino acid sequences that have 3, 2, or 1 amino acid difference with at least one of the amino acid sequences of SEQ ID NO's: 401-675;
[0135] d) the amino acid sequences of SEQ ID NO's: 951-1225;
[0136] e) amino acid sequences that have at least 80% amino acid identity with at least one of the amino acid sequences of SEQ ID NO's: 951-1225;
[0137] f) amino acid sequences that have 3, 2, or 1 amino acid difference with at least one of the amino acid sequences of SEQ ID NO's: 951-1225;
[0138] g) the amino acid sequences of SEQ ID NO's: 1501-1775;
[0139] h) amino acid sequences that have at least 80% amino acid identity with at least one of the amino acid sequences of SEQ ID NO's: 1501-1775;
[0140] i) amino acid sequences that have 3, 2, or 1 amino acid difference with at least one of the amino acid sequences of SEQ ID NO's: 1501-1775;
   or any suitable combination thereof.

[0141] When an amino acid sequence of the invention contains one or more amino acid sequences according to b) and/or c):
[0142] i) any amino acid substitution in such an amino acid sequence according to b) and/or c) is preferably, and compared to the corresponding amino acid sequence according to a), a conservative amino acid substitution, (as defined herein);
   and/or
[0143] ii) the amino acid sequence according to b) and/or c) preferably only contains amino acid substitutions, and no amino acid deletions or insertions, compared to the corresponding amino acid sequence according to a);
   and/or
[0144] iii) the amino acid sequence according to b) and/or c) may be an amino acid sequence that is derived from an amino acid sequence according to a) by means of affinity maturation using one or more techniques of affinity maturation known per se.

[0145] Similarly, when an amino acid sequence of the invention contains one or more amino acid sequences according to e) and/or f):
[0146] i) any amino acid substitution in such an amino acid sequence according to e) and/or f) is preferably, and compared to the corresponding amino acid sequence according to d), a conservative amino acid substitution, (as defined herein);
   and/or
[0147] ii) the amino acid sequence according to e) and/or f) preferably only contains amino acid substitutions, and no amino acid deletions or insertions, compared to the corresponding amino acid sequence according to d);
   and/or
[0148] iii) the amino acid sequence according to e) and/or f) may be an amino acid sequence that is derived from an amino acid sequence according to d) by means of affinity maturation using one or more techniques of affinity maturation known per se.

[0149] Also, similarly, when an amino acid sequence of the invention contains one or more amino acid sequences according to h) and/or i):
[0150] i) any amino acid substitution in such an amino acid sequence according to h) and/or i) is preferably, and compared to the corresponding amino acid sequence according to g), a conservative amino acid substitution, (as defined herein);
   and/or
[0151] ii) the amino acid sequence according to h) and/or i) preferably only contains amino acid substitutions, and no amino acid deletions or insertions, compared to the corresponding amino acid sequence according to g);
   and/or
[0152] iii) the amino acid sequence according to h) and/or i) may be an amino acid sequence that is derived from an amino acid sequence according to g) by means of affinity maturation using one or more techniques of affinity maturation known per se.

[0153] It should be understood that the last preceding paragraphs also generally apply to any amino acid sequences of the invention that comprise one or more amino acid sequences according to b), c), e), f), h) or i), respectively.

[0154] In this specific aspect, the amino acid sequence preferably comprises one or more stretches of amino acid residues chosen from the group consisting of:
[0155] i) the amino acid sequences of SEQ ID NO's: 401-675;
[0156] ii) the amino acid sequences of SEQ ID NO's: 951-1225; and
[0157] iii) the amino acid sequences of SEQ ID NO's: 1501-1775;
   or any suitable combination thereof.

[0158] Also, preferably, in such an amino acid sequence, at least one of said stretches of amino acid residues forms part of the antigen binding site for binding against HER2.

[0159] In a more specific, but again non-limiting aspect, the invention relates to an amino acid sequence directed against HER2, that comprises two or more stretches of amino acid residues chosen from the group consisting of:
[0160] a) the amino acid sequences of SEQ ID NO's: 401-675;
[0161] b) amino acid sequences that have at least 80% amino acid identity with at least one of the amino acid sequences of SEQ ID NO's: 401-675;
[0162] c) amino acid sequences that have 3, 2, or 1 amino acid difference with at least one of the amino acid sequences of SEQ ID NO's: 401-675;
[0163] d) the amino acid sequences of SEQ ID NO's: 951-1225;
[0164] e) amino acid sequences that have at least 80% amino acid identity with at least one of the amino acid sequences of SEQ ID NO's: 951-1225;
[0165] f) amino acid sequences that have 3, 2, or 1 amino acid difference with at least one of the amino acid sequences of SEQ ID NO's: 951-1225;
[0166] g) the amino acid sequences of SEQ ID NO's: 1501-1775;
[0167] h) amino acid sequences that have at least 80% amino acid identity with at least one of the amino acid sequences of SEQ ID NO's: 1501-1775;
[0168] i) amino acid sequences that have 3, 2, or 1 amino acid difference with at least one of the amino acid sequences of SEQ ID NO's: 1501-1775;
   such that (i) when the first stretch of amino acid residues corresponds to one of the amino acid sequences according to a), b) or c), the second stretch of amino acid residues corresponds to one of the amino acid sequences according to d), e), g), h) or i); (ii) when the first stretch of amino acid residues corresponds to one of the amino acid sequences according to d), e) or f), the second stretch of amino acid residues corresponds to one of the amino acid sequences according to a), b), c), g), h) or i); or (iii) when the first stretch of amino acid residues corresponds to one of the amino acid sequences according to g), h) or i), the second stretch of amino acid residues corresponds to one of the amino acid sequences according to a), b), c), d), e) or f).

[0169] In this specific aspect, the amino acid sequence preferably comprises two or more stretches of amino acid residues chosen from the group consisting of:
[0170] i) the amino acid sequences of SEQ ID NO's: 401-675;
[0171] ii) the amino acid sequences of SEQ ID NO's: 951-1225; and
[0172] iii) the amino acid sequences of SEQ ID NO's: 1501-1775;
   such that, (i) when the first stretch of amino acid residues corresponds to one of the amino acid sequences of SEQ ID NO's: 401-675, the second stretch of amino acid residues corresponds to one of the amino acid sequences of SEQ ID NO's: 951-1225 or of SEQ ID NO's: 1501-1775; (ii) when the first stretch of amino acid residues corresponds to one of the amino acid sequences of SEQ ID NO's: 951-1225, the second stretch of amino acid residues corresponds to one of the amino acid sequences of SEQ ID NO's: 401-675 or of SEQ ID NO's: 1501-1775; or (iii) when the first stretch of amino acid residues corresponds to one of the amino acid sequences of SEQ ID NO's: 1501-1775, the second stretch of amino acid residues corresponds to one of the amino acid sequences of SEQ ID NO's: 401-675 or of SEQ ID NO's: 951-1225.

[0173] Also, in such an amino acid sequence, the at least two stretches of amino acid residues again preferably form part of the antigen binding site for binding against HER2.

[0174] In an even more specific, but non-limiting aspect, the invention relates to an amino acid sequence directed against HER2, that comprises three or more stretches of amino acid residues, in which the first stretch of amino acid residues is chosen from the group consisting of:
[0175] a) the amino acid sequences of SEQ ID NO's: 401-675;
[0176] b) amino acid sequences that have at least 80% amino acid identity with at least one of the amino acid sequences of SEQ ID NO's: 401-675;
[0177] c) amino acid sequences that have 3, 2, or 1 amino acid difference with, at least one of the amino acid sequences of SEQ ID NO's: 401-675;
   the second stretch of amino acid residues is chosen from the group consisting of:
[0178] d) the amino acid sequences of SEQ ID NO's: 951-1225;
[0179] e) amino acid sequences that have at least 80% amino acid identity with at least one of the amino acid sequences of SEQ ID NO's: 951-1225;
[0180] f) amino acid sequences that have 3, 2, or 1 amino acid difference with at least one of the amino acid sequences of SEQ ID NO's: 951-1225;
   and the third stretch of amino acid residues is chosen from the group consisting of:
[0181] g) the amino acid sequences of SEQ ID NO's: 1501-1775;
[0182] h) amino acid sequences that have at least 80% amino acid identity with at least one of the amino acid sequences of SEQ ID NO's: 1501-1775;
[0183] i) amino acid sequences that have 3, 2, or 1 amino acid difference with at least one of the amino acid sequences of SEQ ID NO's: 1501-1775.

[0184] Preferably, in this specific aspect, the first stretch of amino acid residues is chosen from the group consisting of the amino acid sequences of SEQ ID NO's: 401-675; the second stretch of amino acid residues is chosen from the group consisting of the amino acid sequences of SEQ ID NO's: 951-1225; and the third stretch of amino acid residues is chosen from the group consisting of the amino acid sequences of SEQ ID NO's: 1501-1775.

[0185] Again, preferably, in such an amino acid sequence, the at least three stretches of amino acid residues forms part of the antigen binding site for binding against HER2. Preferred combinations of such stretches of amino acid sequences will become clear from the further disclosure herein.

[0186] Preferably, in such amino acid sequences the CDR sequences have at least 70% amino acid identity, preferably at least 80% amino acid identity, more preferably at least 90% amino acid identity, such as 95% amino acid identity or more or even essentially 100% amino acid identity with the CDR sequences of at least one of the amino acid sequences of SEQ ID NO's: 2051-2325. This degree of amino acid identity can for example be determined by determining the degree of amino acid identity (in a manner described herein) between said amino acid sequence and one or more of the sequences of SEQ ID NO's: 2051-2325, in which the amino acid residues that form the framework regions are disregarded. Also, such amino acid sequences of the invention can be as further described herein.

[0187] Also, such amino acid sequences are preferably such that they can specifically bind (as defined herein) to HER2; and more in particular bind to HER2 with an affinity (suitably measured and/or expressed as a K_{D}-value (actual or apparent), a K_{A}-value (actual or apparent), a kₒₙ-rate and/or a k_{off}-rate, or alternatively as an IC₅₀ value, as further described herein) that is as defined herein.

[0188] When the amino acid sequence of the invention essentially consists of 4 framework regions (FR1 to FR4, respectively) and 3 complementarity determining regions (CDR1 to CDR3, respectively), the amino acid sequence of the invention is preferably such that:

[0189] CDR1 is chosen from the group consisting of:
[0190] a) the amino acid sequences of SEQ ID NO's: 401-675;
[0191] b) amino acid sequences that have at least 80% amino acid identity with at least one of the amino acid sequences of SEQ ID NO's: 401-675;
[0192] c) amino acid sequences that have 3, 2, or 1 amino acid difference with at least one of the amino acid sequences of SEQ ID NO's: 401-675;
   and/or

[0193] CDR2 is chosen from the group consisting of:
[0194] d) the amino acid sequences of SEQ ID NO's: 951-1225;
[0195] e) amino acid sequences that have at least 80% amino acid identity with at least one of the amino acid sequences of SEQ ID NO's: 951-1225;
[0196] f) amino acid sequences that have 3, 2, or 1 amino acid difference with at least one of the amino acid sequences of SEQ ID NO's: 951-1225;
   and/or

[0197] CDR3 is chosen from the group consisting of:
[0198] g) the amino acid sequences of SEQ ID NO's: 1501-1775;
[0199] h) amino acid sequences that have at least 80% amino acid identity with at least one of the amino acid sequences of SEQ ID NO's: 1501-1775;
[0200] i) amino acid sequences that have 3, 2, or 1 amino acid difference with at least one of the amino acid sequences of SEQ ID NO's: 1501-1775.

[0201] In particular, such an amino acid sequence of the invention may be such that CDR1 is chosen from the group consisting of the amino acid sequences of SEQ ID NO's: 401-675; and/or CDR2 is chosen from the group consisting of the amino acid sequences of SEQ ID NO's: 951-1225; and/or CDR3 is chosen from the group consisting of the amino acid sequences of SEQ ID NO's: 1501-1775.

[0202] In particular, when the amino acid sequence of the invention essentially consists of 4 framework regions (FR1 to FR4, respectively) and 3 complementarity determining regions (CDR1 to CDR3, respectively), the amino acid sequence of the invention is preferably such that:

[0203] CDR1 is chosen from the group consisting of:
[0204] a) the amino acid sequences of SEQ ID NO's: 401-675;
[0205] b) amino acid sequences that have at least 80% amino acid identity with at least one of the amino acid sequences of SEQ ID NO's: 401-675;
[0206] c) amino acid sequences that have 3, 2, or 1 amino acid difference with at least one of the amino acid sequences of SEQ ID NO's: 401-675;
   and

[0207] CDR2 is chosen from the group consisting of:
[0208] d) the amino acid sequences of SEQ ID NO's: 951-1225;
[0209] e) amino acid sequences that have at least 80% amino acid identity with at least one of the amino acid sequences of SEQ ID NO's: 951-1225;
[0210] f) amino acid sequences that have 3, 2, or 1 amino acid difference with at least one of the amino acid sequences of SEQ ID NO's: 951-1225;
   and

[0211] CDR3 is chosen from the group consisting of:
[0212] g) the amino acid sequences of SEQ ID NO's: 1501-1775;
[0213] h) amino acid sequences that have at least 80% amino acid identity with at least one of the amino acid sequences of SEQ ID NO's: 1501-1775;
[0214] i) amino acid sequences that have 3, 2, or 1 amino acid difference with at least one of the amino acid sequences of SEQ ID NO's: 1501-1775; or any suitable fragment of such an amino acid sequence.

[0215] In particular, such an amino acid sequence of the invention may be such that CDR1 is chosen from the group consisting of the amino acid sequences of SEQ ID NO's: 401-675 and CDR2 is chosen from the group consisting of the amino acid sequences of SEQ ID NO's: 951-1225; and CDR3 is chosen from the group consisting of the amino acid sequences of SEQ ID NO's: 1501-1775.

[0216] Again, preferred combinations of CDR sequences will become clear from the further description herein.

[0217] Also, such amino acid sequences are preferably such that they can specifically bind (as defined herein) to HER2; and more in particular bind to HER2 with an affinity (suitably measured and/or expressed as a K_{D}-value (actual or apparent), a K_{A}-value (actual or apparent), a kₒₙ-rate and/or a k_{off}-rate, or alternatively as an IC₅₀ value, as further described herein) that is as defined herein.

[0218] In one preferred, but non-limiting aspect, the invention relates to an amino acid sequence that essentially consists of 4 framework regions (FR1 to FR4, respectively) and 3 complementarity determining regions (CDR1 to CDR3, respectively), in which the CDR sequences of said amino acid sequence have at least 70% amino acid identity, preferably at least 80% amino acid identity, more preferably at least 90% amino acid identity, such as 95% amino acid identity or more or even essentially 100% amino acid identity with the CDR sequences of at least one of the amino acid sequences of SEQ ID NO's: 2051-2325. This degree of amino acid identity can for example be determined by determining the degree of amino acid identity (in a manner described herein) between said amino acid sequence and one or more of the sequences of SEQ ID NO's: 2051-2325, in which the amino acid residues that form the framework regions are disregarded. Such amino acid sequences of the invention can be as further described herein.

[0219] In such an amino acid sequence of the invention, the framework sequences may be any suitable framework sequences, and examples of suitable framework sequences will be clear to the skilled person, for example on the basis the standard handbooks and the further disclosure and prior art mentioned herein.

[0220] The framework sequences are preferably (a suitable combination of) immunoglobulin framework sequences or framework sequences that have been derived from immunoglobulin framework sequences (for example, by humanization or camelization). For example, the framework sequences may be framework sequences derived from a light chain variable domain (e.g. a V_{L}-sequence) and/or from a heavy chain variable domain (e.g. a V_{H}-sequence). In one particularly preferred aspect, the framework sequences are either framework sequences that have been derived from a V_{HH}-sequence (in which said framework sequences may optionally have been partially or fully humanized) or are conventional V_{H} sequences that have been camelized (as defined herein).

[0221] The framework sequences are preferably such that the amino acid sequence of the invention is a domain antibody (or an amino acid sequence that is suitable for use as a domain antibody); is a single domain antibody (or an amino acid sequence that is suitable for use as a single domain antibody); is a “dAb” (or an amino acid sequence that is suitable for use as a dAb); or is a Nanobody® (including but not limited to V_{HH} sequence). Again, suitable framework sequences will be clear to the skilled person, for example on the basis the standard handbooks and the further disclosure and prior art mentioned herein.

[0222] In particular, the framework sequences present in the amino acid sequences of the invention may contain one or more of Hallmark residues (as defined herein), such that the amino acid sequence of the invention is a Nanobody®. Some preferred, but non-limiting examples of (suitable combinations of) such framework sequences will become clear from the further disclosure herein.

[0223] Again, as generally described herein for the amino acid sequences of the invention, it is also possible to use suitable fragments (or combinations of fragments) of any of the foregoing, such as fragments that contain one or more CDR sequences, suitably flanked by and/or linked via one or more framework sequences (for example, in the same order as these CDR's and framework sequences may occur in the full-sized immunoglobulin sequence from which the fragment has been derived). Such fragments may also again be such that they comprise or can form an immunoglobulin fold, or alternatively be such that they do not comprise or cannot form an immunoglobulin fold.

[0224] In one specific aspect, such a fragment comprises a single CDR sequence as described herein (and in particular a CDR3 sequence), that is flanked on each side by (part of) a framework sequence (and in particular, part of the framework sequence(s) that, in the immunoglobulin sequence from which the fragment is derived, are adjacent to said CDR sequence. For example, a CDR3 sequence may be preceded by (part of) a FR3 sequence and followed by (part of) a FR4 sequence). Such a fragment may also contain a disulphide bridge, and in particular a disulphide bridge that links the two framework regions that precede and follow the CDR sequence, respectively (for the purpose of forming such a disulphide bridge, cysteine residues that naturally occur in said framework regions may be used, or alternatively cysteine residues may be synthetically added to or introduced into said framework regions). For a further description of these “Expedite fragments”, reference is again made to WO 03/050531, as well as to WO 08/068,280 of Ablynx N.V.

[0225] In another aspect, the invention relates to a compound or construct, and in particular a protein or polypeptide (also referred to herein as a “compound of the invention” or “polypeptide of the invention”, respectively) that comprises or essentially consists of one or more amino acid sequences of the invention (or suitable fragments thereof), and optionally further comprises one or more other groups, residues, moieties or binding units. As will become clear to the skilled person from the further disclosure herein, such further groups, residues, moieties, binding units or amino acid sequences may or may not provide further functionality to the amino acid sequence of the invention (and/or to the compound or construct in which it is present) and may or may not modify the properties of the amino acid sequence of the invention.

[0226] For example, such further groups, residues, moieties or binding units may be one or more additional amino acid sequences, such that the compound or construct is a (fusion) protein or (fusion) polypeptide. In a preferred but non-limiting aspect, said one or more other groups, residues, moieties or binding units are immunoglobulin sequences. Even more preferably, said one or more other groups, residues, moieties or binding units are chosen from the group consisting of domain antibodies, amino acid sequences that are suitable for use as a domain antibody, single domain antibodies, amino acid sequences that are suitable for use as a single domain antibody, “dAb”'s, amino acid sequences that are suitable for use as a dAb, or Nanobodies.

[0227] Alternatively, such groups, residues, moieties or binding units may for example be chemical groups, residues, moieties, which may or may not by themselves be biologically and/or pharmacologically active. For example, and without limitation, such groups may be linked to the one or more amino acid sequences of the invention so as to provide a “derivative” of an amino acid sequence or polypeptide of the invention, as further described herein.

[0228] Also within the scope of the present invention are compounds or constructs, that comprises or essentially consists of one or more derivatives as described herein, and optionally further comprises one or more other groups, residues, moieties or binding units, optionally linked via one or more linkers. Preferably, said one or more other groups, residues, moieties or binding units are amino acid sequences.

[0229] In the compounds or constructs described above, the one or more amino acid sequences of the invention and the one or more groups, residues, moieties or binding units may be linked directly to each other and/or via one or more suitable linkers or spacers. For example, when the one or more groups, residues, moieties or binding units are amino acid sequences, the linkers may also be amino acid sequences, so that the resulting compound or construct is a fusion (protein) or fusion (polypeptide).

[0230] The compounds or polypeptides of the invention can generally be prepared by a method which comprises at least one step of suitably linking the one or more amino acid sequences of the invention to the one or more further groups, residues, moieties or binding units, optionally via the one or more suitable linkers, so as to provide the compound or polypeptide of the invention. Polypeptides of the invention can also be prepared by a method which generally comprises at least the steps of providing a nucleic acid that encodes a polypeptide of the invention, expressing said nucleic acid in a suitable manner, and recovering the expressed polypeptide of the invention. Such methods can be performed in a manner known per se, which will be clear to the skilled person, for example on the basis of the methods and techniques further described herein.

[0231] The process of designing/selecting and/or preparing a compound or polypeptide of the invention, starting from an amino acid sequence of the invention, is also referred to herein as “formatting” said amino acid sequence of the invention; and an amino acid of the invention that is made part of a compound or polypeptide of the invention is said to be “formatted” or to be “in the format of” said compound or polypeptide of the invention. Examples of ways in which an amino acid sequence of the invention can be formatted and examples of such formats will be clear to the skilled person based on the disclosure herein; and such formatted amino acid sequences form a further aspect of the invention.

[0232] In one specific aspect of the invention, a compound of the invention or a polypeptide of the invention may have an increased half-life, compared to the corresponding amino acid sequence of the invention. Some preferred, but non-limiting examples of such compounds and polypeptides will become clear to the skilled person based on the further disclosure herein, and for example comprise amino acid sequences or polypeptides of the invention that have been chemically modified to increase the half-life thereof (for example, by means of pegylation); amino acid sequences of the invention that comprise at least one additional binding site for binding to a serum protein (such as serum albumin; see for example EP 0 368 684 B1, page 4); or polypeptides of the invention that comprise at least one amino acid sequence of the invention that is linked to at least one moiety (and in particular at least one amino acid sequence) that increases the half-life of the amino acid sequence of the invention. Examples of polypeptides of the invention that comprise such half-life extending moieties or amino acid sequences will become clear to the skilled person based on the further disclosure herein; and for example include, without limitation, polypeptides in which the one or more amino acid sequences of the invention are suitable linked to one or more serum proteins or fragments thereof (such as (human) serum albumin or suitable fragments thereof) or to one or more binding units that can bind to serum proteins (such as, for example, domain antibodies, amino acid sequences that are suitable for use as a domain antibody, single domain antibodies, amino acid sequences that are suitable for use as a single domain antibody, “dAb”'s, amino acid sequences that are suitable for use as a dAb, or Nanobodies that can bind to serum proteins such as serum albumin (such as human serum albumin), serum immunoglobulins such as IgG, or transferrine; reference is made to the further description and references mentioned herein); polypeptides in which an amino acid sequence of the invention is linked to an Fc portion (such as a human Fc) or a suitable part or fragment thereof; or polypeptides in which the one or more amino acid sequences of the invention are suitable linked to one or more small, proteins or peptides that can bind to serum proteins (such as, without limitation, the proteins and peptides described in WO 91/01743, WO 01/45746, WO 02/076489 and to WO 08/068,280 of Ablynx N.V.

[0233] Generally, the compounds or polypeptides of the invention with increased half-life preferably have a half-life that is at least 1.5 times, preferably at least 2 times, such as at least times, for example at least 10 times or more than 20 times, greater than the half-life of the corresponding amino acid sequence of the invention per se. For example, the compounds or polypeptides of the invention with increased half-life may have a half-life that is increased with more than 1 hours, preferably more than 2 hours, more preferably more than 6 hours, such as more than 12 hours, or even more than 24, 48 or 72 hours, compared to the corresponding amino acid sequence of the invention per se.

[0234] In a preferred, but non-limiting aspect of the invention, such compounds or polypeptides of the invention have a serum half-life that is increased with more than 1 hours, preferably more than 2 hours, more preferably more than 6 hours, such as more than 12 hours, or even more than 24, 48 or 72 hours, compared to the corresponding amino acid sequence of the invention per se.

[0235] In another preferred, but non-limiting aspect of the invention, such compounds or polypeptides of the invention exhibit a serum half-life in human of at least about 12 hours, preferably at least 24 hours, more preferably at least 48 hours, even more preferably at least 72 hours or more. For example, compounds or polypeptides of the invention may have a half-life of at least 5 days (such as about 5 to 10 days), preferably at least 9 days (such as about 9 to 14 days), more preferably at least about 10 days (such as about 10 to 15 days), or at least about 11 days (such as about 11 to 16 days), more preferably at least about 12 days (such as about 12 to 18 days or more), or more than 14 days (such as about 14 to 19 days).

[0236] In another aspect, the invention relates to a nucleic acid that encodes an amino acid sequence of the invention or a polypeptide of the invention (or a suitable fragment thereat).

[0237] Such a nucleic acid will also be referred to herein as a “nucleic acid of the invention” and may for example be in the form of a genetic construct, as further described herein.

[0238] In another aspect, the invention relates to a host or host cell that expresses (or that under suitable circumstances is capable of expressing) an amino acid sequence of the invention and/or a polypeptide of the invention; and/or that contains a nucleic acid of the invention. Some preferred but non-limiting examples of such hosts or host cells will become clear from the further description herein.

[0239] The invention further relates to a product or composition containing or comprising at least one amino acid sequence of the invention, at least one polypeptide of the invention (or a suitable fragment thereof) and/or at least one nucleic acid of the invention, and optionally one or more further components of such compositions known per se, i.e. depending on the intended use of the composition. Such a product or composition may for example be a pharmaceutical composition (as described herein), a veterinary composition or a product or composition for diagnostic use (as also described herein). Some preferred but non-limiting examples of such products or compositions will become clear from the further description herein.

[0240] The invention also relates to the use of an amino acid sequence, Nanobody or polypeptide of the invention, or of a composition comprising the same, in (methods or compositions for) modulating HER2, either in vitro (e.g. in an in vitro or cellular assay) or in vivo (e.g. in an a single cell or in a multicellular organism, and in particular in a mammal, and more in particular in a human being, such as in a human being that is at risk of or suffers from a cancer and/or tumor); and/or in methods for killing a tumor cell or inhibiting or preventing proliferation of a tumour cell (either in vitro or in vivo) by suitably contacting said tumor cell with an amino acid sequence, Nanobody or polypeptide of the invention, or of a composition comprising the same. In a preferred, but non-limiting aspect, a biparatopic (or multiparatopic) polypeptide of the invention is used, and more preferably one of the preferred biparatopic (or multiparatopic) polypeptides of the invention, as further described herein.

[0241] The invention also relates to methods for modulating HER2, either in vitro (e.g. in an in vitro or cellular assay) or in vivo (e.g. in an a single cell or multicellular organism, and in particular in a mammal, and more in particular in a human being, such as in a human being that is at risk of or suffers from a cancer and/or tumor), which method comprises at least the step of contacting HER2 with at least one amino acid sequence, Nanobody or polypeptide of the invention, or with a composition comprising the same, in a manner and in an amount suitable to modulate HER2, with at least one amino acid sequence, Nanobody or polypeptide of the invention. In a preferred, but non-limiting aspect, a biparatopic (or multiparatopic) polypeptide of the invention is used, and more preferably one of the preferred biparatopic (or multiparatopic) polypeptides of the invention, as further described herein.

[0242] The invention also relates to the use of an amino acid sequence, Nanobody or polypeptide of the invention in the preparation of a composition (such as, without limitation, a pharmaceutical composition or preparation as further described herein) for modulating HER2, either in vitro (e.g. in an in vitro or cellular assay) or in vivo (e.g. in an a single cell or multicellular organism, and in particular in a mammal, and more in particular in a human being, such as in a human being that is at risk of or suffers from a cancer and/or tumor). In a preferred, but non-limiting aspect, a biparatopic (or multiparatopic) polypeptide of the invention is used, and more preferably one of the preferred biparatopic (or multiparatopic) polypeptides of the invention, as further described herein.

[0243] In the context of the present invention, “modulating” or “to modulate” generally means either reducing or inhibiting the activity of, or alternatively increasing the activity of, HER2, as measured using a suitable in vitro, cellular or in vivo assay (such as those mentioned herein). In particular, “modulating” or “to modulate” may mean either reducing or inhibiting the activity of, or alternatively increasing the activity of HER2, as measured using a suitable in vitro, cellular or in vivo assay (such as those mentioned herein), by at least 1%, preferably at least 5%, such as at least 10% or at least 25%, for example by at least 50%, at least 60%, at least 70%, at least 80%, or 90% or more, compared to activity of HER2 in the same assay under the same conditions but without the presence of the amino acid sequence, Nanobody or polypeptide of the invention.

[0244] As will be clear to the skilled person, “modulating” may also involve effecting a change (which may either be an increase or a decrease) in the sensitivity of HER2 for one or more conditions in the medium or surroundings in which HER2 is present (such as pH, ion strength, the presence of co-factors, etc.), compared to the same conditions but without the presence of the amino acid sequence, Nanobody or polypeptide of the invention. As will be clear to the skilled person, this may again be determined in any suitable manner and/or using any suitable assay known per se, such as the assays described herein or in the prior art cited herein.

[0245] “Modulating” may also mean effecting a change (i.e. an activity as an agonist or as an antagonist, respectively) with respect to one or more biological or physiological mechanisms, effects, responses, functions, pathways or activities in which HER2 (or in which its substrate(s), ligand(s) or pathway(s) are involved, such as its signalling pathway or metabolic pathway and their associated biological or physiological effects) is involved. Again, as will be clear to the skilled person, such an action as an agonist or an antagonist may be determined in any suitable manner and/or using any suitable (in vitro and usually cellular or in assay) assay known per se, such as the assays described herein or in the prior art cited herein. In particular, an action as an agonist or antagonist may be such that an intended biological or physiological activity is increased or decreased, respectively, by at least 1%, preferably at least 5%, such as at least 10% or at least 25%, for example by at least 50%, at least 60%, at least 70%, at least 80%, or 90% or more, compared to the biological or physiological activity in the same assay under the same conditions but without the presence of the amino acid sequence, Nanobody or polypeptide of the invention.

[0246] Modulating may also involve activating HER2 or the mechanism or pathway in which it is involved. Modulating may be reversible or irreversible, but for pharmaceutical and pharmacological purposes will usually be in a reversible manner. Modulating may for example also involve reducing or inhibiting the binding of HER2 to another ERBB receptor (also referred to as heterodimerization) and/or competing with another ERBB receptor for binding to HER2.

[0247] Without being limiting, in one aspect, the amino acid sequence, Nanobody or polypeptide of the invention or the composition comprising the same will inhibit and/or block binding of Herceptin® to HER2. The amino acid sequence, Nanobody or polypeptide of the invention or the composition comprising the same will preferably inhibit binding of Herceptin® to HER2 by at least 1%, preferably at least 5%, such as at least 10%, for example 25% or more or even 50% or more and up to 75% or even more than 90% or more, compared to binding of Herceptin® to HER2 in the absence of the amino acid sequence, Nanobody or polypeptide of the invention or the composition comprising the same.

[0248] In another aspect, the amino acid sequence, Nanobody or polypeptide of the invention or the composition comprising the same will inhibit and/or block binding of Omnitarg to HER2. The amino acid sequence, Nanobody or polypeptide of the invention or the composition comprising the same will preferably inhibit binding of Omnitarg to HER2 by at least 1%, preferably at least 5%, such as at least 10%, for example 25% or more or even 50% or more and up to 75% or even more than 90% or more, compared to binding of Omnitarg to HER2 in the absence of the amino acid sequence, Nanobody or polypeptide of the invention or the composition comprising the same.

[0249] In another aspect, the amino acid sequence, Nanobody or polypeptide of the invention or the composition comprising the same will inhibit and/or block binding of Herceptin® and Omnitarg to HER, preferably essentially simultaneously. The amino acid sequence, Nanobody or polypeptide of the invention or the composition comprising the same will preferably inhibit binding of Herceptin® to HER2 by at least 1%, preferably at least 5%, such as at least 10%, for example 25% or more or even 50% or more and up to 75% or even more than 90% or more, compared to binding of Herceptin® to HER2 in the absence of the amino acid sequence, Nanobody or polypeptide of the invention or the composition comprising the same; and the amino acid sequence, Nanobody or polypeptide of the invention or the composition comprising the same will preferably inhibit binding of Omnitarg to HER2 by at least 1%, preferably at least 5%, such as at least 10%, for example 25% or more or even 50% or more and up to 75% or even more than 90% or more, compared to binding of Omnitarg to HER2 in the absence of the amino acid sequence, Nanobody or polypeptide of the invention or the composition comprising the same.

[0250] In another aspect, which is for example preferred for use in the prevention and treatment of tumors and cancer, the amino acid sequence, Nanobody or polypeptide of the invention or the composition comprising the same is an antagonist of HER2 and/or of the signalling that is mediated by HER-2 and/or by the ligand(s) of HER-2 (i.e. of the signalling that is caused by binding of growth factors of the EGF family to HER-2) and will inhibit and/or block such signalling (i.e. by at least 1%, preferably at least 5%, such as at least 10%, for example 25% or more or even 50% or more and up to 75% or even more than 90% or more, compared to the signalling without the presence of the amino acid sequence, Nanobody or polypeptide of the invention or the composition comprising the same, as determined in a suitable assay); and/or will inhibit or block tumor (e.g. SKBR3) cell proliferation. The amino acid sequence, Nanobody or polypeptide of the invention or the composition comprising the same will preferably inhibit tumor (e.g. SKBR3) cell proliferation by at least 1%, preferably at least 5%, such as at least 10%, for example 25% or more or even 50% or more and up to 75% or even more than 90% or more, compared to the tumor (e.g. SKBR3) cell proliferation in the absence of the amino acid sequence, Nanobody or polypeptide of the invention or the composition comprising the same. In a preferred aspect, the amino acid sequence, Nanobody or polypeptide of the invention or the composition comprising the same will inhibit and/or block tumor (e.g. SKBR3) cell proliferation equally or better than Herceptin®. In another preferred aspect, the amino acid sequence, Nanobody or polypeptide of the invention or the composition comprising the same will inhibit and/or block tumor (e.g. SKBR3) cell proliferation equally or better than Omnitarg. In another preferred aspect, the amino acid sequence, Nanobody or polypeptide of the invention or the composition comprising the same will inhibit and/or block tumor (e.g. SKBR3) cell proliferation equally or better than Herceptin® and Omnitarg. In a preferred, but non-limiting aspect, a suitable antagonistic biparatopic (or multiparatopic) polypeptide of the invention is used, and more preferably one of the preferred biparatopic (or multiparatopic) polypeptides of the invention, as further described herein.

[0251] In another aspect, which is for example preferred for use in the prevention and treatment of diseases and disorders that can be prevented or treated by increasing HER-2 signalling in one or more cells or tissues of a patient to be treated, such as certain cardiac disorders (i.e. those characterised by reduced HER-2-mediated signalling or those that are a side-effect from treating a patient with a HER-2 antagonist), the amino acid sequence. Nanobody or polypeptide of the invention or the composition comprising the same is an agonist of HER2 and will induce cell proliferation. The amino acid sequence, Nanobody or polypeptide of the invention or the composition comprising the same will preferably increase the signalling that is mediated by HER-2 and/or by the ligand(s) of HER-2 (i.e. by at least 1%, preferably at least 5%, such as at least 10%, for example 25% or more or even 50% or more and up to 75% or even more than 90% or more, compared to the signalling without the presence of the amino acid sequence, Nanobody or polypeptide of the invention or the composition comprising the same, as determined in a suitable assay); and/or will induce cell proliferation by at least 1%, preferably at least 5%, such as at least 10%, for example 25% or more or even 50% or more and up to 75% or even more than 90% or more, compared to the cell proliferation in the absence of the amino acid sequence, Nanobody or polypeptide of the invention or the composition comprising the same. In a preferred, but non-limiting aspect, a suitable agonistic biparatopic (or multiparatopic) polypeptide of the invention is used, and more preferably one of the preferred biparatopic (or multiparatopic) polypeptides of the invention, as further described herein.

[0252] In another aspect, which is for example preferred for use in the prevention and treatment of tumors and cancer, the amino acid sequence, Nanobody or polypeptide of the invention or the composition comprising the same is an antagonist of HER2 and will inhibit, downregulate and/or block cell signalling. The amino acid sequence, Nanobody or polypeptide of the invention or the composition comprising the same will preferably inhibit and/or downregulate cell signalling by at least 1%, preferably at least 5%, such as at least 10%, for example 25% or more or even 50% or more and up to 75% or even more than 90% or more, compared to the cell signalling in the absence of the amino acid sequence, Nanobody or polypeptide of the invention or the composition comprising the same. In a preferred aspect, the amino acid sequence, Nanobody or polypeptide of the invention or the composition comprising the same will inhibit, downregulate and/or block cell signalling equally or better than Herceptin®. In another preferred aspect, the amino acid sequence, Nanobody or polypeptide of the invention or the composition comprising the same will inhibit, downregulate and/or block cell signalling equally or better than Omnitarg. In another preferred aspect, the amino acid sequence, Nanobody or polypeptide of the invention or the composition comprising the same will inhibit, downregulate and/or block cell signalling equally or better than Herceptin® and Omnitarg. In a preferred, but non-limiting aspect, a suitable antagonistic biparatopic (or multiparatopic) polypeptide of the invention is used, and more preferably one of the preferred biparatopic (or multiparatopic) polypeptides of the invention, as further described herein.

[0253] In another aspect, which is for example preferred for use in the prevention and treatment of diseases and disorders that can be prevented or treated by increasing HER-2 signalling in one or more cells or tissues of a patient to be treated, such as certain cardiac disorders (i.e. those characterised by reduced HER-2-mediated signalling or those that are a side-effect from treating a patient with a HER-2 antagonist), the amino acid sequence, Nanobody or polypeptide of the invention or the composition comprising the same is an agonist of HER2 and will induce cell signalling. The amino acid sequence, Nanobody or polypeptide of the invention or the composition comprising the same will preferably induce cell signalling by at least 1%, preferably at least 5%, such as at least 10%, for example 25% or more or even 50% or more and up to 75% or even more than 90% or more, compared to the cell signalling in the absence of the amino acid sequence, Nanobody or polypeptide of the invention or the composition comprising the same. In a preferred, but non-limiting aspect, a suitable agonistic biparatopic (or multiparatopic) polypeptide of the invention is used, and more preferably one of the preferred biparatopic (or multiparatopic) polypeptides of the invention, as further described herein.

[0254] In another aspect, which is for example preferred for use in the prevention and treatment of tumors and cancer, the amino acid sequence, Nanobody or polypeptide of the invention or the composition comprising the same is an antagonist of HER2 and will inhibit and/or block tumor (e.g. SKBR3) cell proliferation in vivo. The amino acid sequence, Nanobody or polypeptide of the invention or the composition comprising the same will preferably inhibit tumor (e.g. SKBR3) cell proliferation in vivo by at least 1%, preferably at least 5%, such as at least 10%, for example 25% or more or even 50% or more and up to 75% or even more than 90% or more, compared to the tumor (e.g. SKBR3) cell proliferation in vivo in the absence of the amino acid sequence, Nanobody or polypeptide of the invention or the composition comprising the same. In a preferred aspect, the amino acid sequence, Nanobody or polypeptide of the invention or the composition comprising the same will inhibit and/or block tumor (e.g. SKBR3) cell proliferation in vivo equally or better than Herceptin®. In another preferred aspect, the amino acid sequence, Nanobody or polypeptide of the invention or the composition comprising the same will inhibit and/or block tumor (e.g. SKBR3) cell proliferation in vivo equally or better than Omnitarg. In another preferred aspect, the amino acid sequence, Nanobody or polypeptide of the invention or the composition comprising the same will inhibit and/or block tumor (e.g. SKBR3) cell proliferation in vivo equally or better than Herceptin® and Omnitarg. In a preferred, but non-limiting aspect, a suitable antagonistic biparatopic (or multiparatopic) polypeptide of the invention is used, and more preferably one of the preferred biparatopic (or multiparatopic) polypeptides of the invention, as further described herein.

[0255] In another aspect, which is for example preferred for use in the prevention and treatment of tumors and cancer, the amino acid sequence, Nanobody or polypeptide of the invention or the composition comprising the same is an antagonist of HER2 and will inhibit, downregulate and/or block ligand-mediated ErbB signalling. The amino acid sequence, Nanobody or polypeptide of the invention or the composition comprising the same will preferably inhibit and/or downregulate ligand-mediated ErbB signalling by at least 1%, preferably at least 5%, such as at least 10%, for example 25% or more or even 50% or more and up to 75% or even more than 90% or more, compared to the ligand-mediated ErbB signalling in the absence of the amino acid sequence, Nanobody or polypeptide of the invention or the composition comprising the same. In a preferred aspect, the amino acid sequence, Nanobody or polypeptide of the invention or the composition comprising the same will inhibit and/or block ligand-mediated ErbB signalling equally or better than Herceptin®. In another preferred aspect, the amino acid sequence, Nanobody or polypeptide of the invention or the composition comprising the same will inhibit and/or block ligand-mediated ErbB signalling equally or better than Omnitarg. In another preferred aspect, the amino acid sequence, Nanobody or polypeptide of the invention or the composition comprising the same will inhibit and/or block ligand-mediated ErbB signalling equally or better than Herceptin® and Omnitarg. In a preferred, but non-limiting aspect, a suitable antagonistic biparatopic (or multiparatopic) polypeptide of the invention is used, and more preferably one of the preferred biparatopic (or multiparatopic) polypeptides of the invention, as further described herein.

[0256] In another aspect, which is for example preferred for use in the prevention and treatment of tumors and cancer, the amino acid sequence, Nanobody or polypeptide of the invention or the composition comprising the same is an antagonist of HER2 and will inhibit and/or block HER2 ectodomain cleavage. The amino acid sequence, Nanobody or polypeptide of the invention or the composition comprising the same will preferably inhibit HER2 ectodomain cleavage by at least 1%, preferably at least 5%, such as at least 10%, for example 25% or more or even 50% or more and up to 75% or even more than 90% or more, compared to the HER2 ectodomain cleavage in the absence of the amino acid sequence, Nanobody or polypeptide of the invention or the composition comprising the same. In a preferred aspect, the amino acid sequence, Nanobody or polypeptide of the invention or the composition comprising the same will inhibit and/or block HER2 ectodomain cleavage equally or better than Herceptin®. In another preferred aspect, the amino acid sequence, Nanobody or polypeptide of the invention or the composition comprising the same will inhibit and/or block HER2 ectodomain cleavage equally or better than Omnitarg. In another preferred aspect, the amino acid sequence, Nanobody or polypeptide of the invention or the composition comprising the same will inhibit and/or block HER2 ectodomain cleavage equally or better than Herceptin® and Omnitarg. In a preferred, but non-limiting aspect, a suitable antagonistic biparatopic (or multiparatopic) polypeptide of the invention is used, and more preferably one of the preferred biparatopic (or multiparatopic) polypeptides of the invention, as further described herein.

[0257] In another aspect, which is for example preferred for use in the prevention and treatment of tumors and cancer, the amino acid sequence, Nanobody or polypeptide of the invention or the composition comprising the same is an antagonist of HER2 and will inhibit and/or block Heregulin-mediated activation of MAPK/Erk1/2. The amino acid sequence, Nanobody or polypeptide of the invention or the composition comprising the same will preferably inhibit Heregulin-mediated activation of MAPK/Erk1/2 by at least 1%, preferably at least 5%, such as at least 10%, for example 25% or more or even 50% or more and up to 75% or even more than 90% or more, compared to the Heregulin-mediated activation of MAPK/Erk1/2 in the absence of the amino acid sequence, Nanobody or polypeptide of the invention or the composition comprising the same. In a preferred aspect, the amino acid sequence, Nanobody or polypeptide of the invention or the composition comprising the same will inhibit and/or block Heregulin-mediated activation of MAPK/Erk1/2 equally or better than Herceptin®. In another preferred aspect, the amino acid sequence, Nanobody or polypeptide of the invention or the composition comprising the same will inhibit and/or block Heregulin-mediated activation of MAPK/Erk1/2 equally or better than Omnitarg. In another preferred aspect, the amino acid sequence, Nanobody or polypeptide of the invention or the composition comprising the same will inhibit and/or block Heregulin-mediated activation of MAPK/Erk1/2 equally or better than Herceptin® and Omnitarg. In a preferred, but non-limiting aspect, a suitable antagonistic biparatopic (or multiparatopic) polypeptide of the invention is used, and more preferably one of the preferred biparatopic (or multiparatopic) polypeptides of the invention, as further described herein.

[0258] In another aspect, which is for example preferred for use in the prevention and treatment of tumors and cancer, the amino acid sequence, Nanobody or polypeptide of the invention or the composition comprising the same is an antagonist of HER2 and will inhibit and/or block PI3K/Akt signalling. The amino acid sequence, Nanobody or polypeptide of the invention or the composition comprising the same will preferably inhibit PI3K/Akt signalling by at least 1%, preferably at least 5%, such as at least 10%, for example 25% or more or even 50% or more and up to 75% or even more than 90% or more, compared to the PI3K/Akt signalling in the absence of the amino acid sequence, Nanobody or polypeptide of the invention or the composition comprising the same. In a preferred aspect, the amino acid sequence, Nanobody or polypeptide of the invention or the composition comprising the same will inhibit and/or block PI3K/Akt signalling equally or better than Herceptin®. In another preferred aspect, the amino acid sequence, Nanobody or polypeptide of the invention or the composition comprising the same will inhibit and/or block. PI3K/Akt signalling equally or better than Omnitarg. In another preferred aspect, the amino acid sequence, Nanobody or polypeptide of the invention or the composition comprising the same will inhibit and/or block PI3K/Akt signalling equally or better than Herceptin® and Omnitarg. In a preferred, but non-limiting aspect, a suitable antagonistic biparatopic (or multiparatopic) polypeptide of the invention is used, and more preferably one of the preferred biparatopic (or multiparatopic) polypeptides of the invention, as further described herein.

[0259] In another aspect, which is for example preferred for use in the prevention and treatment of tumors and cancer, the amino acid sequence, Nanobody or polypeptide of the invention or the composition comprising the same is an antagonist of HER2 and will inhibit, downregulate and/or block cell signalling in vivo. The amino acid sequence, Nanobody or polypeptide of the invention or the composition comprising the same will preferably inhibit and/or downregulate cell signalling in vivo by at least 1%, preferably at least 5%, such as at least 10%, for example 25% or more or even 50% or more and up to 75% or even more than 90% or more, compared to the cell signalling in vivo in the absence of the amino acid sequence, Nanobody or polypeptide of the invention or the composition comprising the same. In a preferred aspect, the amino acid sequence, Nanobody or polypeptide of the invention or the composition comprising the same will inhibit and/or block cell signalling in vivo equally or better than Herceptin®. In another preferred aspect, the amino acid sequence, Nanobody or polypeptide of the invention or the composition comprising the same will inhibit and/or block cell signalling in vivo equally or better than Omnitarg. In another preferred aspect, the amino acid sequence, Nanobody or polypeptide of the invention or the composition comprising the same will inhibit and/or block cell signalling in vivo equally or better than Herceptin® and Omnitarg. In a preferred, but non-limiting aspect, a suitable antagonistic biparatopic (or multiparatopic) polypeptide of the invention is used, and more preferably one of the preferred biparatopic (or multiparatopic) polypeptides of the invention, as further described herein.

[0260] In another aspect, which is for example preferred for use in the prevention and treatment of tumors and cancer, the amino acid sequence, Nanobody or polypeptide of the invention or the composition comprising the same will induce apoptosis in tumor cells. The amino acid sequence, Nanobody or polypeptide of the invention or the composition comprising the same will preferably induce apoptosis in tumor cells by at least 1%, preferably at least 5%, such as at least 10%, for example 25% or more or even 50% or more and up to 75% or even more than 90% or more, compared to apoptosis in tumor cells in the absence of the amino acid sequence, Nanobody or polypeptide of the invention or the composition comprising the same. In a preferred aspect, the amino acid sequence, Nanobody or polypeptide of the invention or the composition comprising the same will induce apoptosis in tumor cells equally or better than Herceptin®. In another preferred aspect, the amino acid sequence, Nanobody or polypeptide of the invention or the composition comprising the same will induce apoptosis in tumor cells equally or better than Omnitarg. In another preferred aspect, the amino acid sequence, Nanobody or polypeptide of the invention or the composition comprising the same will induce apoptosis in tumor cells equally or better than Herceptin® and Omnitarg. In a preferred, but non-limiting aspect, a suitable antagonistic biparatopic (or multiparatopic) polypeptide of the invention is used, and more preferably one of the preferred biparatopic (or multiparatopic) polypeptides of the invention, as further described herein.

[0261] In another aspect, which is for example preferred for use in the prevention and treatment of tumors and cancer, the amino acid sequence, Nanobody or polypeptide of the invention or the composition comprising the same will inhibit and/or block heterodimerization between ERBB receptors. The amino acid sequence, Nanobody or polypeptide of the invention or the composition comprising the same will preferably inhibit and/or block heterodimerization between ERBB receptors by at least 1%, preferably at least 5%, such as at least 10%, for example 25% or more or even 50% or more and up to 75% or even more than 90% or more, compared to the heterodimerization between ERBB receptors in the absence of the amino acid sequence, Nanobody or polypeptide of the invention or the composition comprising the same. In a preferred aspect, the amino acid sequence. Nanobody or polypeptide of the invention or the composition comprising the same will inhibit and/or block heterodimerization between ERBB receptors equally or better than Omnitarg. In a preferred, but non-limiting aspect, a suitable antagonistic biparatopic (or multiparatopic) polypeptide of the invention is used, and more preferably one of the preferred biparatopic (or multiparatopic) polypeptides of the invention, as further described herein.

[0262] In another aspect, which is for example preferred for use in the prevention and treatment of tumors and cancer, the amino acid sequence, Nanobody or polypeptide of the invention or the composition comprising the same will inhibit and/or block tumor vascularisation. The amino acid sequence, Nanobody or polypeptide of the invention or the composition comprising the same will preferably inhibit tumor vascularisation by at least 1%, preferably at least 5%, such as at least 10%, for example 25% or more or even 50% or more and up to 75% or even more than 90% or more, compared to the tumor vascularisation in the absence of the amino acid sequence, Nanobody or polypeptide of the invention or the composition comprising the same. In a preferred aspect, the amino acid sequence, Nanobody or polypeptide of the invention or the composition comprising the same will inhibit and/or block tumor vascularisation equally or better than Herceptin®. In another preferred aspect, the amino acid sequence, Nanobody or polypeptide of the invention or the composition comprising the same will inhibit and/or block tumor vascularisation equally or better than Omnitarg. In another preferred aspect, the amino acid sequence, Nanobody or polypeptide of the invention or the composition comprising the same will inhibit and/or block tumor vascularisation equally or better than Herceptin® and Omnitarg. In a preferred, but non-limiting aspect, a suitable antagonistic biparatopic (or multiparatopic) polypeptide of the invention is used, and more preferably one of the preferred biparatopic (or multiparatopic) polypeptides of the invention, as further described herein.

[0263] In another aspect, which is for example preferred for use in the prevention and treatment of tumors and cancer, the amino acid sequence, Nanobody or polypeptide of the invention or the composition comprising the same will inhibit and/or block TNF induced signalling and/or cell proliferation. The amino acid sequence, Nanobody or polypeptide of the invention or the composition comprising the same will preferably inhibit TNF induced signalling and/or cell proliferation by at least 1%, preferably at least 5%, such as at least 10%, for example 25% or more or even 50% or more and up to 75% or even more than 90% or more, compared to the TNF induced signalling and/or cell proliferation in the absence of the amino acid sequence, Nanobody or polypeptide of the invention or the composition comprising the same. In a preferred aspect, the amino acid sequence, Nanobody or polypeptide of the invention or the composition comprising the same will inhibit and/or block TNF induced signalling and/or cell proliferation equally or better than Herceptin®. In another preferred aspect, the amino acid sequence, Nanobody or polypeptide of the invention or the composition comprising the same will inhibit and/or block TNF induced signalling and/or cell proliferation equally or better than Omnitarg. In another preferred aspect, the amino acid sequence, Nanobody or polypeptide of the invention or the composition comprising the same will inhibit and/or block TNF induced signalling and/or cell proliferation equally or better than Herceptin® and Omnitarg. In a preferred, but non-limiting aspect, a suitable antagonistic biparatopic (or multiparatopic) polypeptide of the invention is used, and more preferably one of the preferred biparatopic (or multiparatopic) polypeptides of the invention, as further described herein.

[0264] In another aspect, which is for example preferred for use in the prevention and treatment of tumors and cancer, the amino acid sequence, Nanobody or polypeptide of the invention or the composition comprising the same will downregulate HER2 levels. The amino acid sequence, Nanobody or polypeptide of the invention or the composition comprising the same will preferably will downregulate HER2 levels by at least 1%, preferably at least 5%, such as at least 10%, for example 25% or more or even 50% or more and up to 75% or even more than 90% or more, compared to the HER2 levels in the absence of the amino acid sequence, Nanobody or polypeptide of the invention or the composition comprising the same. In a preferred aspect, the amino acid sequence, Nanobody or polypeptide of the invention or the composition comprising the same will down-regulate HER2 levels equally or better than Herceptin®. In another preferred aspect, the amino acid sequence, Nanobody or polypeptide of the invention or the composition comprising the same will downregulate HER2 levels equally or better than Omnitarg. In another preferred aspect, the amino acid sequence, Nanobody or polypeptide of the invention or the composition comprising the same will downregulate HER2 levels equally or better than Herceptin® and Omnitarg. In a preferred, but non-limiting aspect, a suitable antagonistic biparatopic (or multiparatopic) polypeptide of the invention is used, and more preferably one of the preferred biparatopic (or multiparatopic) polypeptides of the invention, as further described herein.

[0265] In another aspect, which is for example preferred for use in the prevention and treatment of tumors and cancer, the amino acid sequence, Nanobody or polypeptide of the invention or the composition comprising the same will inhibit and/or block metalloproteinase-mediated HER2 ectodomain shedding. The amino acid sequence, Nanobody or polypeptide of the invention or the composition comprising the same will preferably inhibit metalloproteinase-mediated HER2 ectodomain shedding by at least 1%, preferably at least 5%, such as at least 10%, for example 25% or more or even 50% or more and up to 75% or even more than 90% or more, compared to the metalloproteinase-mediated HER2 ectodomain shedding in the absence of the amino acid sequence, Nanobody or polypeptide of the invention or the composition comprising the same. In a preferred aspect, the amino acid sequence, Nanobody or polypeptide of the invention or the composition comprising the same will inhibit and/or block metalloproteinase-mediated HER2 ectodomain shedding equally or better than Herceptin®. In another preferred aspect, the amino acid sequence, Nanobody or polypeptide of the invention or the composition comprising the same will inhibit and/or block metalloproteinase-mediated HER2 ectodomain shedding equally or better than Omnitarg. In another preferred aspect, the amino acid sequence, Nanobody or polypeptide of the invention or the composition comprising the same will inhibit and/or block metalloproteinase-mediated HER2 ectodomain shedding equally or better than Herceptin® and Omnitarg. In a preferred, but non-limiting aspect, a suitable antagonistic biparatopic (or multiparatopic) polypeptide of the invention is used, and more preferably one of the preferred biparatopic (or multiparatopic) polypeptides of the invention, as further described herein.

[0266] The amino acid sequence, Nanobody or polypeptide of the invention or the composition comprising the same should at least “modulate” or effect a change (i.e. an activity as an agonist or as an antagonist, respectively) with respect to at least one biological or physiological mechanisms, effects, responses, functions, pathways or activities (also referred to herein as “having at least one mode of action”) in which HER2 (or in which its pathway(s) are involved, such as its signalling pathway or metabolic pathway and their associated biological or physiological effects) is involved. In one aspect, the amino acid sequence, Nanobody or polypeptide of the invention or the composition comprising the same may “modulate” or effect a change with respect to more than one (such as two, three, four or even more) biological or physiological mechanisms, effects, responses, functions, pathways or activities (i.e. the amino acid sequence, Nanobody or polypeptide of the invention or the composition comprising the same may have more than one mode of action). In this respect, the present inventors surprisingly found that the biparatopic amino acid sequence, Nanobody or polypeptide of the invention or the composition comprising the same could combine two different modes of action (such as e.g. they could inhibit and/or block two different cell signalling pathways; they could e.g. inhibit and/or block heterodimerization between ERBB receptors and at the same time downregulate HER2 levels).

[0267] The different modes of action are mediated each by one of the binding units (as further defined herein) of the biparatopic amino acid sequence, Nanobody or polypeptide of the invention, wherein each binding unit binds at a different binding site of HER2. In a preferred aspect, the biparatopic amino acid sequence, Nanobody or polypeptide of the invention combine the modes of action of Herceptin® and Omnitarg.

[0268] Accordingly, the present invention also relates to a biparatopic amino acid sequence, Nanobody or polypeptide of the invention or a composition comprising the same that combines two different modes of action each mediated by one of the binding units of the biparatopic amino acid sequence, Nanobody or polypeptide of the invention, wherein each binding unit binds at a different binding site of HER2.

[0269] Accordingly, the present invention also relates to a triparatopic amino acid sequence, Nanobody or polypeptide of the invention or a composition comprising the same that combines two or three different modes of action each mediated by one of the binding units of the triparatopic amino acid sequence, Nanobody or polypeptide of the invention, wherein each binding unit binds at a different binding site of HER2.

[0270] More generally, the present invention relates to a multiparatopic amino acid sequence, Nanobody or polypeptide of the invention or a composition comprising the same that combines two or more different modes of action each mediated by one of the binding units of the multiparatopic amino acid sequence, Nanobody or polypeptide of the invention, wherein each binding unit binds at a different binding site of HER2.

[0271] The invention further relates to methods for preparing or generating the amino acid sequences, polypeptides, nucleic acids, host cells, products and compositions described herein. Some preferred but non-limiting examples of such methods will become clear from the further description herein.

[0272] Generally, these methods may comprise the steps of:
[0273] a) providing a set, collection or library of amino acid sequences; and
[0274] b) screening said set, collection or library of amino acid sequences for amino acid sequences that can bind to and/or have affinity for HER2;
   and
[0275] c) isolating the amino acid sequence(s) that can bind to and/or have affinity for HER2.

[0276] In such a method, the set, collection or library of amino acid sequences may be any suitable set, collection or library of amino acid sequences. For example, the set, collection or library of amino acid sequences may be a set, collection or library of immunoglobulin sequences (as described herein), such as a naïve set, collection or library of immunoglobulin sequences; a synthetic or semi-synthetic set, collection or library of immunoglobulin sequences; and/or a set, collection or library of immunoglobulin sequences that have been subjected to affinity maturation.

[0277] Also, in such a method, the set, collection or library of amino acid sequences may be a set, collection or library of heavy chain variable domains (such as V_{H} domains or V_{HH} domains) or of light chain variable domains. For example, the set, collection or library of amino acid sequences may be a set, collection or library of domain antibodies or single domain antibodies, or may be a set, collection or library of amino acid sequences that are capable of functioning as a domain antibody or single domain antibody.

[0278] In a preferred aspect of this method, the set, collection or library of amino acid sequences may be an immune set, collection or library of immunoglobulin sequences, for example derived from a mammal that has been suitably immunized with HER2 or with a suitable antigenic determinant based thereon or derived therefrom, such as an antigenic part, fragment, region, domain, loop or other epitope thereof. In one particular aspect, said antigenic determinant may be an extracellular part, region, domain, loop or other extracellular epitope(s).

[0279] In the above methods, the set, collection or library of amino acid sequences may be displayed on a phage, phagemid, ribosome or suitable micro-organism (such as yeast), such as to facilitate screening. Suitable methods, techniques and host organisms for displaying and screening (a set, collection or library of) amino acid sequences will be clear to the person skilled in the art, for example on the basis of the further disclosure herein. Reference is also made to the review by Hoogenboom in Nature Biotechnology, 23, 9, 1105-1116 (2005).

[0280] In the above step b), the set, collection or library may for example be screened for (nucleic acid sequences that encode) amino acid sequences that can bind to the Herceptin® binding site on HER-2 (and may in particular to domain IV of HER2, more in particular to the C-terminus of domain IV of HER2) and/or that compete with Herceptin® for binding to HER-2.

[0281] Alternatively, in the above step b), the set, collection or library may for example be screened for (nucleic acid sequences that encode) amino acid sequences that can bind to the Omnitarg binding site on HER-2 (and may in particular to domain II of HER2, more in particular to the middle of domain II of HER2) and/or that compete with Omnitarg for binding to HER-2.

[0282] In the above methods, screening or selecting for (nucleic acid sequences that encode) amino acid sequences that compete with Herceptin® or Omnitarg, respectively, may be performed using generally known methods for screening or selecting for competitors of known binding molecules, which may for example involve performing the screening or selection in the presence of the binding molecule and/or determining the binding affinity of the compound(s) to be screened in the presence of the binding molecule.

[0283] In another aspect, the method for generating amino acid sequences comprises at least the steps of:
[0284] a) providing a collection or sample of cells expressing amino acid sequences;
[0285] b) screening said collection or sample of cells for cells that express an amino acid sequence that can bind to and/or have affinity for HER2;
   and
[0286] c) either (i) isolating said amino acid sequence; or (ii) isolating from said cell a nucleic acid sequence that encodes said amino acid sequence, followed by expressing said amino acid sequence.

[0287] For example, when the desired amino acid sequence is an immunoglobulin sequence, the collection or sample of cells may for example be a collection or sample of B-cells. Also, in this method, the sample of cells may be derived from a mammal that has been suitably immunized with HER2 or with a suitable antigenic determinant based thereon or derived therefrom, such as an antigenic part, fragment, region, domain, loop or other epitope thereof. In one particular aspect, said antigenic determinant may be an extracellular part, region, domain, loop or other extracellular epitope(s).

[0288] The above method may be performed in any suitable manner, as will be clear to the skilled person. Reference is for example made to EP 0 542 810, WO 05/19824, WO 04/051268 and WO 04/106377. The screening of step b) is preferably performed using a flow cytometry technique such as FACS. For this, reference is for example made to Lieby et al., Blood, Vol. 97, No. 12, 3820 (2001).

[0289] Again, in the above step b), the set, collection or library may for example be screened for (nucleic acid sequences that encode) amino acid sequences that can bind to the Herceptin® binding site on HER-2 (and may in particular to domain IV of HER2, more in particular to the C-terminus of domain IV of HER2) and/or that compete with Herceptin® for binding to HER-2; or alternatively for (nucleic acid sequences that encode) amino acid sequences that can bind to the Omnitarg binding site on HER-2 (and may in particular to domain II of HER2, more in particular to the middle of domain II of HER2) and/or that compete with Omnitarg for binding to HER-2.

[0290] In another aspect, the method for generating an amino acid sequence directed against HER2 may comprise at least the steps of
[0291] a) providing a set, collection or library of nucleic acid sequences encoding amino acid sequences;
[0292] b) screening said set, collection or library of nucleic acid sequences for nucleic acid sequences that encode an amino acid sequence that can bind to and/or has affinity for HER2;
   and
[0293] c) isolating said nucleic acid sequence, followed by expressing said amino acid sequence.

[0294] In such a method, the set, collection or library of nucleic acid sequences encoding amino acid sequences may for example be a set, collection or library of nucleic acid sequences encoding a naïve set, collection or library of immunoglobulin sequences; a set, collection or library of nucleic acid sequences encoding a synthetic or semi-synthetic set, collection or library of immunoglobulin sequences; and/or a set, collection or library of nucleic acid sequences encoding a set, collection or library of immunoglobulin sequences that have been subjected to affinity maturation.

[0295] Also, in such a method, the set, collection or library of nucleic acid sequences may encode a set, collection or library of heavy chain variable domains (such as V_{H} domains or V_{HH} domains) or of light chain variable domains. For example, the set, collection or library of nucleic acid sequences may encode a set, collection or library of domain antibodies or single domain antibodies, or a set, collection or library of amino acid sequences that are capable of functioning as a domain antibody or single domain antibody.

[0296] In a preferred aspect of this method, the set, collection or library of nucleic acid sequences may be an immune set, collection or library of nucleic acid sequences, for example derived from a mammal that has been suitably immunized with HER2 or with a suitable antigenic determinant based thereon or derived therefrom, such as an antigenic part, fragment, region, domain, loop or other epitope thereof. In one particular aspect, said antigenic determinant may be an extracellular part, region, domain, loop or other extracellular epitope(s).

[0297] The set, collection or library of nucleic acid sequences may for example encode an immune set, collection or library of heavy chain variable domains or of light chain variable domains. In one specific aspect, the set, collection or library of nucleotide sequences may encode a set, collection or library of V_{HH} sequences.

[0298] In the above methods, the set, collection or library of nucleotide sequences may be displayed on a phage, phagemid, ribosome or suitable micro-organism (such as yeast), such as to facilitate screening. Suitable methods, techniques and host organisms for displaying and screening (a set, collection or library of) nucleotide sequences encoding amino acid sequences will be clear to the person skilled in the art, for example on the basis of the further disclosure herein. Reference is also made to the review by Hoogenboom in Nature Biotechnology, 23, 9, 1105-1116 (2005).

[0299] Again, in the above step b), the set, collection or library may for example be screened for (nucleic acid sequences that encode) amino acid sequences that can bind to the Herceptin® binding site on HER-2 (and may in particular to domain IV of HER2, more in particular to the C-terminus of domain IV of HER2) and/or that compete with Herceptin® for binding to HER-2; or alternatively for (nucleic acid sequences that encode) amino acid sequences that can bind to the Omnitarg binding site on HER-2 (and may in particular to domain II of HER2, more in particular to the middle of domain II of HER2) and/or that compete with Omnitarg for binding to HER-2.

[0300] In another aspect, the method for generating an amino acid sequence directed against HER2 may comprise at least the steps of:
[0301] a) providing a set, collection or library of nucleic acid sequences encoding amino acid sequences;
[0302] b) screening said set, collection or library of nucleic acid sequences for nucleic acid sequences that encode an amino acid sequence that can bind to and/or has affinity for HER2 and that is cross-blocked or is cross blocking a Nanobody of the invention, e.g. SEQ ID NO: 2051-2325, or a polypeptide or construct of the invention, e.g. SEQ ID NO: 2326-2390; and
[0303] c) isolating said nucleic acid sequence, followed by expressing said amino acid sequence.

[0304] In such a method, the set, collection or library of nucleic acid sequences encoding amino acid sequences may for example be a set, collection or library of nucleic acid sequences encoding a naïve set, collection or library of immunoglobulin sequences; a set, collection or library of nucleic acid sequences encoding a synthetic or semi-synthetic set, collection or library of immunoglobulin sequences; and/or a set, collection or library of nucleic acid sequences encoding a set, collection or library of immunoglobulin sequences that have been subjected to affinity maturation.

[0305] Also, in such a method, the set, collection or library of nucleic acid sequences may encode a set, collection or library of heavy chain variable domains (such as V_{H} domains or V_{HH} domains) or of light chain variable domains. For example, the set, collection or library of nucleic acid sequences may encode a set, collection or library of domain antibodies or single domain antibodies, or a set, collection or library of amino acid sequences that are capable of functioning as a domain antibody or single domain antibody.

[0306] In a preferred aspect of this method, the set, collection or library of nucleic acid sequences may be an immune set, collection or library of nucleic acid sequences, for example derived from a mammal that has been suitably immunized with HER2 or with a suitable antigenic determinant based thereon or derived therefrom, such as an antigenic part, fragment, region, domain, loop or other epitope thereof. In one particular aspect, said antigenic determinant may be an extracellular part, region, domain, loop or other extracellular epitope(s).

[0307] The set, collection or library of nucleic acid sequences may for example encode an immune set, collection or library of heavy chain variable domains or of light chain variable domains. In one specific aspect, the set, collection or library of nucleotide sequences may encode a set, collection or library of V_{HH} sequences.

[0308] In the above methods, the nucleic acid sequence encoding an HER2 binding amino acid sequence fused to the set, collection or library of nucleotide sequences may be displayed on a phage, phagemid, ribosome or suitable micro-organism (such as yeast), such as to facilitate screening. Suitable methods, techniques and host organisms for displaying and screening (a set, collection or library of) nucleotide sequences encoding amino acid sequences will be clear to the person skilled in the art, for example on the basis of the further disclosure herein. Reference is also made to the review by Hoogenboom in. Nature Biotechnology, 23, 9, 1105-1116 (2005).

[0309] Also encompassed within the present invention are methods for preparing and generating multiparatopic (such as e.g. biparatopic, triparatopic, etc.) amino acids of the invention.

[0310] Without being limiting, a method for preparing and generating biparatopic amino acids of the invention may comprise at least the steps of:
[0311] a) providing a nucleic acid sequence encoding an HER2 binding amino acid sequence fused to a set, collection or library of nucleic acid sequences encoding amino acid sequences;
[0312] b) screening said set, collection or library of nucleic acid sequences for nucleic acid sequences that encode an amino acid sequence that can bind to and/or has affinity for an antigenic determinant on HER2 different from the antigenic determinant recognized by the HER2 binding amino acid sequence;
   and
[0313] c) isolating the nucleic acid sequence encoding an HER2 binding amino acid sequence fused to the nucleic acid sequence obtained in b), followed by expressing the encoded amino acid sequence.

[0314] The biparatopic amino acid sequence obtained in the method above, can subsequently be fused to one or more further sets, collections or libraries of nucleic acid sequences encoding amino acid sequences and again screened for nucleic acid sequences that encode an amino acid sequence that can bind to and/or has affinity for an antigenic determinant on HER2 different from the antigenic determinant of the HER2 binding amino acid sequence and the antigenic determinant of b) in order to obtain a triparatopic or multiparatopic amino acid sequence respectively.

[0315] in such a method, the set, collection or library of nucleic acid sequences encoding amino acid sequences may for example be a set, collection or library of nucleic acid sequences encoding a naïve set, collection or library of immunoglobulin sequences; a set, collection or library of nucleic acid sequences encoding a synthetic or semi-synthetic set, collection or library of immunoglobulin sequences; and/or a set, collection or library of nucleic acid sequences encoding a set, collection or library of immunoglobulin sequences that have been subjected to affinity maturation.

[0316] Also, in such a method, the set, collection or library of nucleic acid sequences may encode a set, collection or library of heavy chain variable domains (such as V_{H} domains or V_{HH} domains) or of light chain variable domains. For example, the set, collection or library of nucleic acid sequences may encode a set, collection or library of domain antibodies or single domain antibodies, or a set, collection or library of amino acid sequences that are capable of functioning as a domain antibody or single domain antibody.

[0317] In a preferred aspect of this method, the set, collection or library of nucleic acid sequences may be an immune set, collection or library of nucleic acid sequences, for example derived from a mammal that has been suitably immunized with HER2 or with a suitable antigenic determinant based thereon or derived therefrom, such as an antigenic part, fragment, region, domain, loop or other epitope thereof. In one particular aspect, said antigenic determinant may be an extracellular part, region, domain, loop or other extracellular epitope(s).

[0318] The set, collection or library of nucleic acid sequences may for example encode an immune set, collection or library of heavy chain variable domains or of light chain variable domains. In one specific aspect, the set, collection or library of nucleotide sequences may encode a set, collection or library of V_{HH} sequences.

[0319] In the above methods, the nucleic acid sequence encoding an HER2 binding amino acid sequence fused to the set, collection or library of nucleotide sequences may be displayed on a phage, phagemid, ribosome or suitable micro-organism (such as yeast), such as to facilitate screening. Suitable methods, techniques and host organisms for displaying and screening (a set, collection or library of) nucleotide sequences encoding amino acid sequences will be clear to the person skilled in the art, for example on the basis of the further disclosure herein. Reference is also made to the review by Hoogenboom in Nature Biotechnology, 23, 9, 1105-1116 (2005).

[0320] According to a particularly preferred aspect, a method for preparing and generating biparatopic amino acids of the invention may comprise at least the steps of:
[0321] a) providing a set, collection or library of nucleic acid sequences, in which each nucleic acid sequence in said set, collection or library encodes a fusion protein that comprises a first amino acid sequence that can bind to and/or has affinity for a first antigenic determinant, part, domain or epitope on HER2 that is fused (optionally via a linker sequence) to a second amino acid sequence, in which essentially each second amino acid sequence (or most of these) is a different member of a set, collection or library of different amino acid sequences;
[0322] b) screening said set, collection or library of nucleic acid sequences for nucleic acid sequences that encode an amino acid sequence that can bind to and/or has affinity for a second antigenic determinant, part, domain or epitope on HER2 different from the first antigenic determinant, part, domain or epitope on HER-2;
   and
[0323] c) isolating the nucleic acid sequences that encode an amino acid sequence that can bind to and/or has affinity for a second antigenic determinant, part, domain or epitope on HER2 different from the first antigenic determinant, part, domain or epitope on HER-2, obtained in b), optionally followed by expressing the encoded amino acid sequence.

[0324] In this preferred method, the first amino acid sequence in the fusion protein encoded by said set collection or library of nucleic acid sequences may be the same amino acid sequence for all members of the set, collection or library of nucleic acid sequences encoding the fusion protein; or the first amino acid sequence in the fusion protein encoded by said set collection or library of nucleic acid sequences may also be a member of a set collection or library of different amino acid sequences.

[0325] Again, in such a method, the set, collection or library of nucleic acid sequences encoding amino acid sequences that form part of the fusion protein may for example be a set, collection or library of nucleic acid sequences encoding a naïve set, collection or library of immunoglobulin sequences; a set, collection or library of nucleic acid sequences encoding a synthetic or semi-synthetic set, collection or library of immunoglobulin sequences; and/or a set, collection or library of nucleic acid sequences encoding a set, collection or library of immunoglobulin sequences that have been subjected to affinity maturation.

[0326] Also, in such a method, the set, collection or library of nucleic acid sequences may encode a set, collection or library of heavy chain variable domains (such as V_{H} domains or V_{HH} domains) or of light chain variable domains. For example, the set, collection or library of nucleic acid sequences may encode a set, collection or library of domain antibodies or single domain antibodies, or a set, collection or library of amino acid sequences that are capable of functioning as a domain antibody or single domain antibody.

[0327] In a preferred aspect of this method, the set, collection or library of nucleic acid sequences may be an immune set, collection or library of nucleic acid sequences, for example derived from a mammal that has been suitably immunized with HER2 or with a suitable antigenic determinant based thereon or derived therefrom, such as an antigenic part, fragment, region, domain, loop or other epitope thereof. In one particular aspect, said antigenic determinant may be an extracellular part, region, domain, loop or other extracellular epitope(s).

[0328] The set, collection or library of nucleic acid sequences may for example encode an immune set, collection or library of heavy chain variable domains or of light chain variable domains. In one specific aspect, the set, collection or library of nucleotide sequences may encode a set, collection or library of V_{HH} sequences.

[0329] In the above methods, the nucleic acid sequence encoding an HER2 binding amino acid sequence fused to the set, collection or library of nucleotide sequences may be displayed on a phage, phagemid, ribosome or suitable micro-organism (such as yeast), such as to facilitate screening. Suitable methods, techniques and host organisms for displaying and screening (a set, collection or library of) nucleotide sequences encoding amino acid sequences will be clear to the person skilled in the art, for example on the basis of the further disclosure herein. Reference is also made to the review by Hoogenboom in Nature Biotechnology, 23, 9, 11.05-1116 (2005).

[0330] In step b), the set, collection or library of nucleic acid sequences may also be screened for nucleic acid sequences that encode an amino acid sequence that can bind to and/or has affinity for both the first antigenic determinant, part, domain or epitope on HER2 and the second antigenic determinant, part, domain or epitope on HER2. This may for example be performed in a subsequent steps (i.e. by in a first step screening or selecting for nucleic acid sequences that encode an amino acid sequence that can bind to and/or has affinity for the second antigenic determinant, part, domain or epitope on HER2, and subsequently in a second step selecting or screening for nucleic acid sequences that encode an amino acid sequence that can bind to and/or has affinity for the first antigenic determinant, part, domain or epitope on HER2; or visa versa) or in a single step (i.e. by simultaneously screening or selecting for nucleic acid sequences that encode an amino acid sequence that can bind to and/or has affinity for both the first antigenic determinant, part, domain or epitope on HER2 and the second antigenic determinant, part, domain or epitope on HER2).

[0331] In a preferred aspect of the above method, the first amino acid sequence used in step a) is preferably such that (i) it can bind to and/or has affinity for the Herceptin® binding site on HER2 (and may in particular be directed against domain IV of HER2, more in particular the C-terminus of domain IV of HER2) and/or (ii) competes with Herceptin® for binding to HER-2; and in step b), the set, collection or library of nucleic acid sequences is screened for nucleic acid sequences that encode (i) an amino acid sequence that can bind to and/or has affinity for the Omnitarg binding site on HER2 (and may in particular domain II of HER2, more in particular the middle of domain II of HER2) and/or (ii) an amino acid sequence that can compete with Omnitarg (or the Omnitarg Fab used in Example 9) for binding to HER-2.

[0332] Alternatively, the first amino acid sequence used in step a) is preferably such that (i) it can bind to and/or has affinity for the Omnitarg binding site on HER2 (and may in particular domain IT of HER2, more in particular the middle of domain II of HER2) and/or (ii) competes with Omnitarg for binding to HER-2; and in step b), the set, collection or library of nucleic acid sequences is screened for nucleic acid sequences that encode (i) an amino acid sequence that can bind to and/or has affinity for the Herceptin® binding site on HER2 (and in particular domain IV of HER2, more in particular the C-terminus of domain IV of HER2) and/or (ii) an amino acid sequence that can compete with Herceptin® for binding to HER-2.

[0333] In the above methods, screening or selecting for (nucleic acid sequences that encode) amino acid sequences that compete with Herceptin® or Omnitarg, respectively, may be performed using generally known methods for screening or selecting for competitors of known binding molecules, which may for example involve performing the screening or selection in the presence of the binding molecule and/or determining the binding affinity of the compound(s) to be screened in the presence of the binding molecule.

[0334] It is also possible, in step b), to screen for nucleic acid sequences that both (i) encode an amino acid sequence that can bind to and/or has affinity for the Omnitarg binding site on HER2 (and in particular domain II of HER2, more in particular the middle of domain II of HER2) and/or that can compete with Omnitarg (or the Omnitarg Fab used in Example 9) for binding to HER-2; and that also (ii) encode an amino acid sequence that can bind to and/or has affinity for the Herceptin® binding site on HER2 (and in particular domain IV of HER2, more in particular the C-terminus of domain IV of HER2) and/or that can compete with Herceptin® for binding to HER-2. Again, this may be performed in separate steps or a single step, and by selecting or screening in the presence of Herceptin® and/or Omnitarg, as applicable.

[0335] It will also be clear to the skilled person that the above methods may be performed by screening a set, collection or library of amino acid sequences that correspond to (e.g. are encoded by) the nucleic acid sequences used in the above method; and such methods form further aspects of the invention.

[0336] The invention in a further aspect provides a method for preparing and generating biparatopic amino acids of the invention which comprises at least the steps of:
[0337] a) providing a set, collection or library of nucleic acid sequences, in which each nucleic acid sequence in said set, collection or library encodes a fusion protein that comprises a first amino acid sequence that can bind to and/or has affinity for a first antigenic determinant, part, domain or epitope on HER2 that is fused via a linker sequence to a second amino acid sequence that can bind to and/or has affinity for a second antigenic determinant, part, domain or epitope on HER2 (which may be the same or different as the first antigenic determinant, part, domain or epitope on HER2), in which essentially each nucleic acid sequence (or most of these) encodes a fusion protein with a different linker sequence so as to provide a set, collection or library of nucleic acid sequences encoding different fusion proteins;
[0338] b) screening said set, collection or library of nucleic acid sequences for nucleic acid sequences that encode an amino acid sequence that can bind to and/or has affinity for the first and second antigenic determinant, part, domain or epitope on HER2;
   and
[0339] c) isolating the nucleic acid sequences that encode an amino acid sequence that can bind to and/or has affinity for the first and second antigenic determinant, part, domain or epitope on HER2, optionally followed by expressing the encoded amino acid sequence.

[0340] As will be clear to the skilled person, this method can be used to screen for suitable or even optimal linker lengths for linking the first and second amino acid sequence. For example, in this aspect, the first amino acid sequence may be an amino acid sequence that can bind to and/or has affinity for the Omnitarg binding site on HER2 (and may in particular domain II of HER2, more in particular the middle of domain II of HER2) and/or that can compete with Omnitarg (or the Omnitarg Fab used in Example 9); and the second amino acid sequence may be an amino acid sequence that can bind to and/or has affinity for the Herceptin® binding site on HER2 (and in particular domain IV of HER2, more in particular the C-terminus of domain IV of HER2) and/or that can compete with Herceptin® for binding to HER-2 (or visa versa). The screening and selection step b) may be performed as further described above.

[0341] Another method for preparing and generating biparatopic amino acids of the invention may comprise at least the steps of:
[0342] a) providing a set, collection or library of nucleic acid sequences encoding amino acid sequences;
[0343] b) screening said set, collection or library of nucleic acid sequences for a set, collection or library of nucleic acid sequences that encode an amino acid sequence that can bind to and/or has affinity for HER2;
[0344] c) ligating said set, collection or library of nucleic acid sequences that encode an amino acid sequence that can bind to and/or has affinity for HER2 to another nucleic acid sequence that encodes an amino acid sequence that can bind to and/or has affinity for HER2 (e.g. a nucleic acid sequence that encodes an amino acid sequence that competes with Herceptin® for binding HER2);
   and
[0345] d) from the set, collection or library of nucleic acid sequences obtained in c), isolating the nucleic acid sequences encoding a biparatopic amino acid sequence that can bind to and/or has affinity for HER2 (and e.g. further selecting for nucleic acid sequences that encode a biparatopic amino acid sequence that antagonizes with higher potency compared to the monovalent amino acid sequences), followed by expressing the encoded amino acid sequence.

[0346] The biparatopic amino acid sequence obtained in the method above, can subsequently be fused to one or more further sets, collections or libraries of nucleic acid sequences encoding amino acid sequences that can bind to and/or have affinity for HER2 in order to obtain a triparatopic or multiparatopic amino acid sequence respectively.

[0347] In such a method, the set, collection or library of nucleic acid sequences encoding amino acid sequences may for example be a set, collection or library of nucleic acid sequences encoding a naïve set, collection or library of immunoglobulin sequences; a set, collection or library of nucleic acid sequences encoding a synthetic or semi-synthetic set, collection or library of immunoglobulin sequences; and/or a set, collection or library of nucleic acid sequences encoding a set, collection or library of immunoglobulin sequences that have been subjected to affinity maturation.

[0348] The set, collection or library of nucleic acid sequences that encode an amino acid sequence that can bind to and/or has affinity for HER2 can be obtained by any selection or screening method known in the art for the selection and/or screening of nucleic acid sequences that encode an amino acid sequence that can bind to and/or has affinity for HER2 and as, for example, described in the Examples section.

[0349] Also, in such a method, the set, collection or library of nucleic acid sequences may encode a set, collection or library of heavy chain variable domains (such as V_{H} domains or V_{HH} domains) or of light chain variable domains. For example, the set, collection or library of nucleic acid sequences may encode a set, collection or library of domain antibodies or single domain antibodies, or a set, collection or library of amino acid sequences that are capable of functioning as a domain antibody or single domain antibody.

[0350] In a preferred aspect of this method, the set, collection or library of nucleic acid sequences may be an immune set, collection or library of nucleic acid sequences, for example derived from a mammal that has been suitably immunized with HER2 or with a suitable antigenic determinant based thereon or derived therefrom, such as an antigenic part, fragment, region, domain, loop or other epitope thereof. In one particular aspect, said antigenic determinant may be an extracellular part, region, domain, loop or other extracellular epitope(s).

[0351] The set, collection or library of nucleic acid sequences may for example encode an immune set, collection or library of heavy chain variable domains or of light chain variable domains. In one specific aspect, the set, collection or library of nucleotide sequences may encode a set, collection or library of V_{HH} sequences.

[0352] In the above methods, the nucleic acid sequence may be displayed on a phage, phagemid, ribosome or suitable micro-organism (such as yeast), such as to facilitate screening. Suitable methods, techniques and host organisms for displaying and screening (a set, collection or library of) nucleotide sequences encoding amino acid sequences will be clear to the person skilled in the art, for example on the basis of the further disclosure herein. Reference is also made to the review by Hoogenboom in Nature Biotechnology, 23, 9, 1105-1116 (2005).

[0353] Another method for preparing and generating biparatopic amino acids of the invention may comprise at least the steps of:
[0354] a) providing a first set, collection or library of nucleic acid sequences encoding amino acid sequences;
[0355] b) screening said first set, collection or library of nucleic acid sequences for a nucleic acid sequence that encodes an amino acid sequence that can bind to and/or has affinity for a first antigenic determinant, part, domain or epitope on HER2;
[0356] c) ligating the nucleic acid sequence encoding said amino acid sequence that can bind to and/or has affinity for a first antigenic determinant, part, domain or epitope on HER2 obtained in b) to another set, collection or library of nucleic acid sequences encoding amino acid sequences to obtain a set, collection or library of nucleic acid sequences that encode fusion proteins;
[0357] d) screening said set, collection or library of nucleic acid sequences obtained in step c) for a nucleic acid sequence that encodes an amino acid sequence that can bind a second antigenic determinant, part, domain or epitope on HER2 different from the first antigenic determinant, part, domain or epitope on HER-2;
   and
[0358] e) isolating the nucleic acid sequence that encodes an amino acid sequence that can bind to and/or has affinity for the first and second antigenic determinant, part, domain or epitope on HER2, optionally followed by expressing the encoded amino acid sequence.

[0359] In a preferred aspect of the above method, the first amino acid sequence obtained in step b) is preferably such that (i) it can bind to and/or has affinity for the Herceptin® binding site on HER2 (and may in particular be directed against domain IV of HER2, more in particular the C-terminus of domain IV of HER2) and/or (ii) competes with Herceptin® for binding to HER-2; and in step d), the set, collection or library of nucleic acid sequences is screened for nucleic acid sequences that encode (i) an amino acid sequence that can bind to and/or has affinity for the Omnitarg binding site on HER2 (and may in particular domain II of HER2, more in particular the middle of domain II of HER2) and/or (ii) an amino acid sequence that can compete with Omnitarg (or the Omnitarg Fab used in Example 9) for binding to HER-2.

[0360] Alternatively, the first amino acid sequence obtained in step b) is preferably such that (i) it can bind to and/or has affinity for the Omnitarg binding site on HER2 (and may in particular domain II of HER2, more in particular the middle of domain II of HER2) and/or (ii) competes with Omnitarg for binding to HER-2; and in step d), the set, collection or library of nucleic acid sequences is screened for nucleic acid sequences that encode (i) an amino acid sequence that can bind to and/or has affinity for the Herceptin® binding site on HER2 (and in particular domain IV of HER2, more in particular the C-terminus of domain IV of HER2) and/or (ii) an amino acid sequence that can compete with Herceptin® for binding to HER-2.

[0361] In the above methods, screening or selecting for (nucleic acid sequences that encode) amino acid sequences that compete with Herceptin® or Omnitarg, respectively, may be performed using generally known methods for screening or selecting for competitors of known binding molecules, which may for example involve performing the screening or selection in the presence of the binding molecule and/or determining the binding affinity of the compound(s) to be screened in the presence of the binding molecule.

[0362] It is also possible, in step d), to screen for nucleic acid sequences that both (i) encode an amino acid sequence that can bind to and/or has affinity for the Omnitarg binding site on HER2 (and in particular domain II of HER2, more in particular the middle of domain II of HER2) and/or that can compete with Omnitarg (or the Omnitarg Fab used in Example 9) for binding to HER-2; and that also (ii) encode an amino acid sequence that can bind to and/or has affinity for the Herceptin® binding site on HER2 (and in particular domain IV of HER2, more in particular the C-terminus of domain IV of HER2) and/or that can compete with Herceptin® for binding to HER-2. Again, this may be performed in separate steps or a single step, and by selecting or screening in the presence of Herceptin® and/or Omnitarg, as applicable.

[0363] The biparatopic amino acid sequence obtained in the method above, can subsequently be fused to one or more further sets, collections or libraries of nucleic acid sequences encoding amino acid sequences that can bind to and/or have affinity for HER2 in order to obtain a triparatopic or multiparatopic amino acid sequence respectively. In such a method, the set, collection or library of nucleic acid sequences encoding amino acid sequences may for example be a set, collection or library of nucleic acid sequences encoding a naïve set, collection or library of immunoglobulin sequences; a set, collection or library of nucleic acid sequences encoding a synthetic or semi-synthetic set, collection or library of immunoglobulin sequences; and/or a set, collection or library of nucleic acid sequences encoding a set, collection or library of immunoglobulin sequences that have been subjected to affinity maturation.

[0364] The set, collection or library of nucleic acid sequences that encode an amino acid sequence that can bind to and/or has affinity for HER2 can be obtained by any selection or screening method known in the art for the selection and/or screening of nucleic acid sequences that encode an amino acid sequence that can bind to and/or has affinity for HER2 and as, for example, described in the Examples section.

[0365] Also, in such a method, the set, collection or library of nucleic acid sequences may encode a set, collection or library of heavy chain variable domains (such as V_{H} domains or V_{HH} domains) or of light chain variable domains. For example, the set, collection or library of nucleic acid sequences may encode a set, collection or library of domain antibodies or single domain antibodies, or a set, collection or library of amino acid sequences that are capable of functioning as a domain antibody or single domain antibody.

[0366] In a preferred aspect of this method, the set, collection or library of nucleic acid sequences may be an immune set, collection or library of nucleic acid sequences, for example derived from a mammal that has been suitably immunized with HER2 or with a suitable antigenic determinant based thereon or derived therefrom, such as an antigenic part, fragment, region, domain, loop or other epitope thereof. In one particular aspect, said antigenic determinant may be an extracellular part, region, domain, loop or other extracellular epitope(s).

[0367] The set, collection or library of nucleic acid sequences may for example encode an immune set, collection or library of heavy chain variable domains or of light chain variable domains. In one specific aspect, the set, collection or library of nucleotide sequences may encode a set, collection or library of V_{HH} sequences.

[0368] In the above methods, the nucleic acid sequence may be displayed on a phage, phagemid, ribosome or suitable micro-organism (such as yeast), such as to facilitate screening. Suitable methods, techniques and host organisms for displaying and screening (a set, collection or library of) nucleotide sequences encoding amino acid sequences will be clear to the person skilled in the art, for example on the basis of the further disclosure herein. Reference is also made to the review by Hoogenboom in Nature Biotechnology, 23, 9, 1105-1116 (2005).

[0369] The invention also relates to amino acid sequences that are obtained by the above methods, or alternatively by a method that comprises one of the above methods and in addition at least the steps of determining the nucleotide sequence or amino acid sequence of said immunoglobulin sequence; and of expressing or synthesizing said amino acid sequence in a manner known per se, such as by expression in a suitable host cell or host organism or by chemical synthesis.

[0370] Another method for preparing multivalent and/or multiparatopic/biparatopic amino acids or constructs of the invention may comprise at least the steps of linking two or more monovalent amino acid sequences or monovalent construct of the invention and for example one or more linkers together in a suitable manner. The monovalent constructs (and linkers) can be coupled by any method known in the art and as further described herein. Preferred techniques include the linking of the nucleic acid sequences that encode the monovalent constructs (and linkers) to prepare a genetic construct that expresses the multivalent and/or multiparatopic/biparatopic amino acid or construct. Techniques for linking amino acid sequences or nucleic acid sequences will be clear to the skilled person, and reference is again made to the standard handbooks, such as Sambrook et al. and Ausubel et al., mentioned above, as well as the Examples below.

[0371] Accordingly, the present invention also relates to the use of a monovalent construct (which may comprise or essentially consists of an amino acid sequence of the invention such as a domain antibody, an amino acid sequence that is suitable for use as a domain antibody, a single domain antibody, an amino acid sequence that is suitable for use as a single domain antibody, a “dAb”, an amino acid sequences that is suitable for use as a dAb, or a Nanobody) in providing and/or preparing a multivalent (such as multiparatopic, and preferably biparatopic) compound or construct. The monovalent construct is then used as a binding domain or binding unit in providing and/or preparing the multivalent (such as multiparatopic, and preferably biparatopic) construct comprising two (e.g. in a biparatopic construct) or more (e.g. in a multiparatopic construct) binding units. In this respect, the monovalent construct may be used as a binding domain or binding unit in providing and/or preparing a multivalent (such as multiparatopic, and preferably biparatopic) construct of the invention comprising two or more binding units.

[0372] In a preferred aspect, the monovalent construct (which may comprise or essentially consists of an amino acid sequence of the invention such as a domain antibody, an amino acid sequence that is suitable for use as a domain antibody, a single domain antibody, an amino acid sequence that is suitable for use as a single domain antibody, a “dAb”, an amino acid sequences that is suitable for use as a dAb, or a Nanobody) is used in providing and/or preparing a multivalent (such as multiparatopic, and preferably biparatopic) construct that exhibits intramolecular binding compared to intermolecular binding. In such multivalent constructs of the invention that comprises amino acid sequences directed against two or more (different) antigenic determinants on the same antigen (for example against different epitopes of an antigen and/or against different subunits of a multimeric receptor or protein), the length and flexibility of the linker are preferably such that, when the multivalent construct binds to HER-2, at least two and preferably all of the amino acid sequences that are present in the multivalent construct can (simultaneously) bind to each of their intended antigenic determinants, epitopes, parts or domains, most preferably so as to allow binding with increased avidity and also intramolecular binding and/or recognition. Accordingly, the present invention also relates to the use of a monovalent construct (which may comprise or essentially consists of an amino acid sequence of the invention such as a domain antibody, an amino acid sequence that is suitable for use as a domain antibody, a single domain antibody, an amino acid sequence that is suitable for use as a single domain antibody, a “dAb”, an amino acid sequences that is suitable for use as a dAb, or a Nanobody) as a binding domain or binding unit in providing and/or preparing a multivalent (such as multiparatopic, and preferably biparatopic) construct, wherein the binding domains or binding units are linked via a linker such that the multivalent (such as multiparatopic, and preferably biparatopic) construct preferably exhibits intramolecular binding compared to intermolecular binding.

[0373] In some of the most preferred multiparatopic polypeptides of the invention, (i) at least one monovalent construct of the invention (and in particular at least one Nanobody) is used that is directed against the Omnitarg binding site on HER2 (and in particular against domain II of HER2, and more in particular against the middle of domain II of HER2) and/or that is capable of competing with Omnitarg for binding to HER-2; and at least one amino acid sequence of the invention (and in particular at least one Nanobody) is used that is directed against another antigenic determinant, epitope, part or domain of HER2. In such a preferred multiparatopic construct of the invention, the linker is most preferably such that the multiparatopic construct of the invention is capable of (simultaneously) binding to both the Omnitarg binding site on HER2 (and in particular against domain II of HER2, and more in particular against the middle of domain II of HER2) as well as the other antigenic determinant, epitope, part or domain of HER2, again most preferably so as to allow binding with increased avidity and also intramolecular binding and/or recognition. Accordingly, also encompassed in the present invention is the use of a monovalent construct comprising an amino acid of the invention (and in particular a Nanobody) that is directed against the Omnitarg binding site on HER2 (and in particular against domain II of HER2, and more in particular against the middle of domain II of HER2) and/or that is capable of competing with Omnitarg for binding to HER-2, as a binding domain or binding unit in providing and/or preparing a multiparatopic (such as biparatopic) construct, wherein the binding domains or binding units are linked via a linker such that the multiparatopic (such as biparatopic) construct preferably exhibits intramolecular binding compared to intermolecular binding.

[0374] In some of the most preferred multiparatopic polypeptides of the invention, (i) at least one monovalent construct of the invention (and in particular at least one Nanobody) is used that is directed against the Herceptin® binding site on HER2 (and in particular against domain IV of HER2, and more in particular against the C-terminus of domain IV of HER2) and/or that is capable of competing with Herceptin® for binding to HER-2; and at least one amino acid of the invention (and in particular at least one Nanobody) is used that is directed against another antigenic determinant, epitope, part or domain of HER2. In such a preferred multiparatopic construct of the invention, the linker is most preferably such that the multiparatopic construct of the invention is capable of (simultaneously) binding to both the Herceptin® binding site on HER2 (and in particular against domain IV of HER2, and more in particular against the C-terminus of domain IV of HER2), as well as the other antigenic determinant, epitope, part or domain of HER2, again most preferably so as to allow binding with increased avidity and also intramolecular binding and/or recognition. Accordingly, also encompassed in the present invention is the use of a monovalent construct comprising an amino acid sequence of the invention (and in particular at least one Nanobody) that is directed against the Herceptin® binding site on HER2 (and in particular against domain IV of HER2, and more in particular against the C-terminus of domain IV of HER2) and/or that is capable of competing with Herceptin® for binding to HER-2, as a binding domain or binding unit in providing and/or preparing a multiparatopic (such as a biparatopic) construct, wherein the binding domains or binding units are linked via a linker such that the multiparatopic (such as biparatopic) construct preferably exhibits intramolecular binding compared to intermolecular binding.

[0375] In some of the most preferred multiparatopic polypeptides of the invention, (i) at least one monovalent construct of the invention (and in particular at least one Nanobody) is used that is directed against the Omnitarg binding site on HER2 (and in particular against domain II of HER2, and more in particular against the middle of domain II of HER2) and/or that is capable of competing with Omnitarg for binding to HER-2; and at least one monovalent construct of the invention (and in particular at least one Nanobody) is used that is directed against the Herceptin® binding site on HER2 (and in particular against domain IV of HER2, and more in particular against the C-terminus of domain IV of HER2) and/or that is capable of competing with Herceptin® for binding to HER-2. In such a preferred multiparatopic construct of the invention, the linker is most preferably such that the multiparatopic construct of the invention is capable of (simultaneously) binding to both the Omnitarg binding site on HER2 (and in particular against domain II of HER2, and more in particular against the middle of domain II of HER2) as well as the Herceptin® binding site on HER2 (and in particular against domain IV of HER2, and more in particular against the C-terminus of domain IV of HER2), again most preferably so as to allow binding with increased avidity and also intramolecular binding and/or recognition. Accordingly, also encompassed in the present invention is the use of a monovalent construct comprising an amino acid sequence of the invention (and in particular at least one Nanobody) that is directed against the Herceptin® binding site on HER2 (and in particular against domain IV of HER2, and more in particular against the C-terminus of domain IV of HER2) and/or that is capable of competing with Herceptin® for binding to HER-2, and a monovalent construct comprising an amino acid of the invention (and in particular a Nanobody) that is directed against the Omnitarg binding site on HER2 (and in particular against domain II of HER2, and more in particular against the middle of domain II of HER2) and/or that is capable of competing with Omnitarg for binding to HER-2, as binding domains or binding units in providing and/or preparing a multiparatopic (such as a biparatopic) construct, wherein the binding domains or binding units are linked via a linker such that the multiparatopic (such as biparatopic) construct preferably exhibits intramolecular binding compared to intermolecular binding.

[0376] The invention also relates to amino acid sequences that are obtained by the above methods, or alternatively by a method that comprises one of the above methods and in addition at least the steps of determining the nucleotide sequence or amino acid sequence of said immunoglobulin sequence; and of expressing or synthesizing said amino acid sequence in a manner known per se, such as by expression in a suitable host cell or host organism or by chemical synthesis.

[0377] In this respect, the present invention also relates to the use of a nucleic acid or nucleotide sequence that encodes a monovalent construct of the invention for the preparation of a genetic construct (as further defined herein) that encodes a multivalent (such as multiparatopic, and preferably biparatopic) construct. Also, as will be clear to the skilled person, to prepare such a genetic construct, encoding a multivalent (such as multiparatopic, and preferably biparatopic) construct of the invention, several nucleotide sequences, such as at least two nucleotide sequences encoding a monovalent construct of the invention and for example nucleic acids encoding one or more linkers can be linked together in a suitable manner. Such genetic constructs generally also comprises one or more elements of genetic constructs known per se, such as for example one or more suitable regulatory elements (such as a suitable promoter(s), enhancer(s), terminator(s), etc.) and the further elements of genetic constructs referred to herein.

[0378] Techniques for generating the nucleic acids of the invention will be clear to the skilled person and may for instance include, but are not limited to, automated DNA synthesis; site-directed mutagenesis; combining two or more naturally occurring and/or synthetic sequences (or two or more parts thereof), introduction of mutations that lead to the expression of a truncated expression product; introduction of one or more restriction sites (e.g. to create cassettes and/or regions that may easily be digested and/or ligated using suitable restriction enzymes), and/or the introduction of mutations by means of a PCR reaction using one or more “mismatched” primers. These and other techniques will be clear to the skilled person, and reference is again made to the standard handbooks, such as Sambrook et al. and Ausubel et al., mentioned above, as well as the Examples below.

[0379] Also, following the steps above, one or more amino acid sequences of the invention may be suitably humanized (or alternatively camelized); and/or the amino acid sequence(s) thus obtained may be linked to each other or to one or more other suitable amino acid sequences (optionally via one or more suitable linkers) so as to provide a polypeptide of the invention. Also, a nucleic acid sequence encoding an amino acid sequence of the invention may be suitably humanized (or alternatively camelized) and suitably expressed; and/or one or more nucleic acid sequences encoding an amino acid sequence of the invention may be linked to each other or to one or more nucleic acid sequences that encode other suitable amino acid sequences (optionally via nucleotide sequences that encode one or more suitable linkers), after which the nucleotide sequence thus obtained may be suitably expressed so as to provide a polypeptide of the invention.

[0380] The invention further relates to applications and uses of the amino acid sequences, compounds, constructs, polypeptides, nucleic acids, host cells, products and compositions described herein, as well as to methods for the prevention and/or treatment for diseases and disorders associated with HER2. Some preferred but non-limiting applications and uses will become clear from the further description herein.

[0381] The invention also relates to the amino acid sequences, compounds, constructs, polypeptides, nucleic acids, host cells, products and compositions described herein for use in therapy.

[0382] In particular, the invention also relates to the amino acid sequences, compounds, constructs, polypeptides, nucleic acids, host cells, products and compositions described herein for use in therapy of a disease or disorder that can be prevented or treated by administering, to a subject in need thereof, of (a pharmaceutically effective amount of) an amino acid sequence, compound, construct or polypeptide as described herein.

[0383] More in particular, the invention relates to the amino acid sequences, compounds, constructs, polypeptides, nucleic acids, host cells, products and compositions described herein for use in therapy of cancers and/or tumors.

[0384] Other aspects, embodiments, advantages and applications of the invention will also become clear from the further description herein, in which the invention will be described and discussed in more detail with reference to the Nanobodies of the invention and polypeptides of the invention comprising the same, which form some of the preferred aspects of the invention.

[0385] As will become clear from the further description herein, Nanobodies generally offer certain advantages (outlined herein) compared to “dAb's” or similar (single) domain antibodies or immunoglobulin sequences, which advantages are also provided by the Nanobodies of the invention. However, it will be clear to the skilled person that the more general aspects of the teaching below can also be applied (either directly or analogously) to other amino acid sequences of the invention.

### DETAILED DESCRIPTION OF THE INVENTION

[0386] In the present description, examples and claims:
[0387] a) Unless indicated or defined otherwise, all terms used have their usual meaning in the art, which will be clear to the skilled person. Reference is for example made to the standard handbooks, such as Sambrook et al, “Molecular Cloning: A Laboratory Manual” (2nd. Ed.), Vols. 1-3, Cold Spring Harbor Laboratory Press (1989); F. Ausubel et al, eds., “Current protocols in molecular biology”, Green Publishing and Wiley Interscience, New York (1987); Lewin, “Genes II”, John Wiley & Sons, New York, N.Y., (1985); Old et al., “Principles of Gene Manipulation: An Introduction to Genetic Engineering”, 2nd edition, University of California Press, Berkeley, Calif. (1981); Roitt et al., “Immunology” (6th. Ed.), Mosby/Elsevier, Edinburgh (2001); Roitt et al., Roitt's Essential Immunology, 10^{th} Ed. Blackwell Publishing, UK (2001); and Janeway et al., “Immunobiology” (6th Ed.), Garland Science Publishing/Churchill Livingstone, N.Y. (2005), as well as to the general background art cited herein;
[0388] b) Unless indicated otherwise, the term “immunoglobulin sequence”—whether used herein to refer to a heavy chain antibody or to a conventional 4-chain antibody—is used as a general term to include both the full-size antibody, the individual chains thereof, as well as all parts, domains or fragments thereof (including but not limited to antigen-binding domains or fragments such as V_{HH} domains or V_{H}/V_{L} domains, respectively). In addition, the term “sequence” as used herein (for example in terms like “immunoglobulin sequence”, “antibody sequence”, “variable domain sequence”, “V_{HH} sequence” or “protein sequence”), should generally be understood to include both the relevant amino acid sequence as well as nucleic acids or nucleotide sequences encoding the same, unless the context requires a more limited interpretation. Also, the term “nucleotide sequence” as used herein also encompasses a nucleic acid molecule with said nucleotide sequence, so that the terms “nucleotide sequence” and “nucleic acid” should be considered equivalent and are used interchangeably herein;
[0389] c) Unless indicated otherwise, all methods, steps, techniques and manipulations that are not specifically described in detail can be performed and have been performed in a manner known per se, as will be clear to the skilled person. Reference is for example again made to the standard handbooks and the general background art mentioned herein and to the further references cited therein; as well as to for example the following reviews Presta, Adv. Drug Deliv. Rev. 2006, 58 (5-6): 640-56; Levin and Weiss, Mol. Biosyst. 2006, 2(1): 49-57; Irving et al., J. Immunol. Methods, 2001, 248(1-2), 31-45; Schmitz et al., Placenta, 2000, 21 Suppl. A, S106-12, Gonzales et al., Tumour Biol., 2005, 26(1), 31-43, which describe techniques for protein engineering, such as affinity maturation and other techniques for improving the specificity and other desired properties of proteins such as immunoglobulins.
[0390] d) Amino acid residues will be indicated according to the standard three-letter or one-letter amino acid code, as mentioned in Table A-2;

TABLE A-2
one-letter and three-letter amino acid code

| | | | |
|---|---|---|---|
| Nonpolar, | Alanine | Ala | A |
| uncharged | Valine | Val | V |
| (at pH 6.0-7.0)⁽³⁾ | Leucine | Leu | L |
| | Isoleucine | Ile | I |
| | Phenylalanine | Phe | F |
| | Methionine⁽¹⁾ | Met | M |
| | Tryptophan | Trp | W |
| | Proline | Pro | P |
| Polar, | Glycine⁽²⁾ | Gly | G |
| uncharged | Serine | Ser | S |
| (at pH 6.0-7.0) | Threonine | Thr | T |
| | Cysteine | Cys | C |
| | Asparagine | Asn | N |
| | Glutamine | Gln | Q |
| | Tyrosine | Tyr | Y |
| Polar, | Lysine | Lys | K |
| charged | Arginine | Arg | R |
| (at pH 6.0-7.0) | Histidine⁽⁴⁾ | His | H |
| | Aspartate | Asp | D |
| | Glutamate | Glu | E |

Notes:
⁽¹⁾Sometimes also considered to be a polar uncharged amino acid.
⁽²⁾Sometimes also considered to be a nonpolar uncharged amino acid.
⁽³⁾As will be clear to the skilled person, the fact that an amino acid residue is referred to in this Table as being either charged or uncharged at pH 6.0 to 7.0 does not reflect in any way on the charge said amino acid residue may have at a pH lower than 6.0 and/or at a pH higher than 7.0; the amino acid residues mentioned in the Table can be either charged and/or uncharged at such a higher or lower pH, as will be clear to the skilled person.
⁽⁴⁾As is known in the art, the charge of a His residue is greatly dependant upon even small shifts in pH, but a His residu can generally be considered essentially uncharged at a pH of about 6.5.

[0391] e) For the purposes of comparing two or more nucleotide sequences, the percentage of “sequence identity” between a first nucleotide sequence and a second nucleotide sequence may be calculated by dividing [the number of nucleotides in the first nucleotide sequence that are identical to the nucleotides at the corresponding positions in the second nucleotide sequence] by [the total number of nucleotides in the first nucleotide sequence] and multiplying by [100%], in which each deletion, insertion, substitution or addition of a nucleotide in the second nucleotide sequence—compared to the first nucleotide sequence—is considered as a difference at a single nucleotide (position).
Alternatively, the degree of sequence identity between two or more nucleotide sequences may be calculated using a known computer algorithm for sequence alignment such as NCBI Blast v2.0, using standard settings.
Some other techniques, computer algorithms and settings for determining the degree of sequence identity are for example described in WO 04/037999, EP 0 967 284, EP 1 085 089, WO 00/55318, WO 00/78972, WO 98/49185 and GB 2 357 768-A.
Usually, for the purpose of determining the percentage of “sequence identity” between two nucleotide sequences in accordance with the calculation method outlined hereinabove, the nucleotide sequence with the greatest number of nucleotides will be taken as the “first” nucleotide sequence, and the other nucleotide sequence will be taken as the “second” nucleotide sequence;
[0392] f) For the purposes of comparing two or more amino acid sequences, the percentage of “sequence identity” between a first amino acid sequence and a second amino acid sequence (also referred to herein as “amino acid identity”) may be calculated by dividing [the number of amino acid residues in the first amino acid sequence that are identical to the amino acid residues at the corresponding positions in the second amino acid sequence] by [the total number of amino acid residues in the first amino acid sequence] and multiplying by [100%], in which each deletion, insertion, substitution or addition of an amino acid residue in the second amino acid sequence—compared to the first amino acid sequence—is considered as a difference at a single amino acid residue (position), i.e. as an “amino acid difference” as defined herein.
Alternatively, the degree of sequence identity between two amino acid sequences may be calculated using a known computer algorithm, such as those mentioned above for determining the degree of sequence identity for nucleotide sequences, again using standard settings.
Usually, for the purpose of determining the percentage of “sequence identity” between two amino acid sequences in accordance with the calculation method outlined hereinabove, the amino acid sequence with the greatest number of amino acid residues will be taken as the “first” amino acid sequence, and the other amino acid sequence will be taken as the “second” amino acid sequence.
Also, in determining the degree of sequence identity between two amino acid sequences, the skilled person may take into account so-called “conservative” amino acid substitutions, which can generally be described as amino acid substitutions in which an amino acid residue is replaced with another amino acid residue of similar chemical structure and which has little or essentially no influence on the function, activity or other biological properties of the polypeptide. Such conservative amino acid substitutions are well known in the art, for example from WO 04/037999, GB-A-3 357 768, WO 98/49185, WO 00/46383 and WO 01/09300; and (preferred) types and/or combinations of such substitutions may be selected on the basis of the pertinent teachings from WO 04/037999 as well as WO 98/49185 and from the further references cited therein.
Such conservative substitutions preferably are substitutions in which one amino acid within the following groups (a)-(e) is substituted by another amino acid residue within the same group: (a) small aliphatic, nonpolar or slightly polar residues: Ala, Ser, Thr, Pro and Gly; (b) polar, negatively charged residues and their (uncharged) amides: Asp, Asn, Glu and Gln; (c) polar, positively charged residues: His, Arg and Lys; (d) large aliphatic, nonpolar residues: Met, Leu, Ile, Val and Cys; and (e) aromatic residues: Phe, Tyr and Trp.
Particularly preferred conservative substitutions are as follows: Ala into Gly or into Ser; Arg into Lys; Asn into Gln or into His; Asp into Glu; Cys into Ser; Gln into Asn; Glu into Asp; Gly into Ala or into Pro; His into Asn or into Gln; Ile into Leu or into Val; Leu into Ile or into Val; Lys into Arg, into Gln or into Glu; Met into Leu, into Tyr or into Ile; Phe into Met, into Leu or into Tyr; Ser into Thr; Thr into Ser; Trp into Tyr; Tyr into Trp; and/or Phe into Val, into Ile or into Leu.
Any amino acid substitutions applied to the polypeptides described herein may also be based on the analysis of the frequencies of amino acid variations between homologous proteins of different species developed by Schulz et al., Principles of Protein Structure, Springer-Verlag, 1978, on the analyses of structure forming potentials developed by Chou and Fasman, Biochemistry 13: 211, 1974 and Adv. Enzymol., 47: 45-149, 1978, and on the analysis of hydrophobicity patterns in proteins developed by Eisenberg et al., Proc. Nad. Acad. Sci. USA 81: 140-144, 1984; Kyte & Doolittle; J Molec. Biol. 157: 105-132, 1981, and Goldman et al., Ann. Rev. Biophys. Chem. 15: 321-353, 1986, all incorporated herein in their entirety by reference. Information on the primary, secondary and tertiary structure of Nanobodies is given in the description herein and in the general background art cited above. Also, for this purpose, the crystal structure of a V_{HH} domain from a llama is for example given by Desmyter et al., Nature Structural. Biology, Vol. 3, 9, 803 (1996); Spinelli et al., Natural Structural Biology (1996); 3, 752-757; and Decanniere et al., Structure, Vol. 7, 4, 361 (1999). Further information about some of the amino acid residues that in conventional V_{H} domains form the V_{H}/V_{L} interface and potential camelizing substitutions on these positions can be found in the prior art cited above.
[0393] g) Amino acid sequences and nucleic acid sequences are said to be “exactly the same” if they have 100% sequence identity (as defined herein) over their entire length;
[0394] h) When comparing two amino acid sequences, the term “amino acid difference” refers to an insertion, deletion or substitution of a single amino acid residue on a position of the first sequence, compared to the second sequence; it being understood that two amino acid sequences can contain one, two or more such amino acid differences;
[0395] i) When a nucleotide sequence or amino acid sequence is said to “comprise” another nucleotide sequence or amino acid sequence, respectively, or to “essentially consist of” another nucleotide sequence or amino acid sequence, this may mean that the latter nucleotide sequence or amino acid sequence has been incorporated into the firstmentioned nucleotide sequence or amino acid sequence, respectively, but more usually this generally means that the firstmentioned nucleotide sequence or amino acid sequence comprises within its sequence a stretch of nucleotides or amino acid residues, respectively, that has the same nucleotide sequence or amino acid sequence, respectively, as the latter sequence, irrespective of how the firstmentioned sequence has actually been generated or obtained (which may for example be by any suitable method described herein). By means of a non-limiting example, when a Nanobody of the invention is said to comprise a CDR sequence, this may mean that said CDR sequence has been incorporated into the Nanobody of the invention, but more usually this generally means that the Nanobody of the invention contains within its sequence a stretch of amino acid residues with the same amino acid sequence as said CDR sequence, irrespective of how said Nanobody of the invention has been generated or obtained. It should also be noted that when the latter amino acid sequence has a specific biological or structural function, it preferably has essentially the same, a similar or an equivalent biological or structural function in the firstmentioned amino acid sequence (in other words, the firstmentioned amino acid sequence is preferably such that the latter sequence is capable of performing essentially the same, a similar or an equivalent biological or structural function). For example, when a Nanobody of the invention is said to comprise a CDR sequence or framework sequence, respectively, the CDR sequence and framework are preferably capable, in said Nanobody, of functioning as a CDR sequence or framework sequence, respectively. Also, when a nucleotide sequence is said to comprise another nucleotide sequence, the firstmentioned nucleotide sequence is preferably such that, when it is expressed into an expression product (e.g. a polypeptide), the amino acid sequence encoded by the latter nucleotide sequence forms part of said expression product (in other words, that the latter nucleotide sequence is in the same reading frame as the firstmentioned, larger nucleotide sequence).
[0396] j) A nucleic acid sequence or amino acid sequence is considered to be “(in) essentially isolated (form)”—for example, compared to its native biological source and/or the reaction medium or cultivation medium from which it has been obtained—when it has been separated from at least one other component with which it is usually associated in said source or medium, such as another nucleic acid, another protein/polypeptide, another biological component or macromolecule or at least one contaminant, impurity or minor component. In particular, a nucleic acid sequence or amino acid sequence is considered “essentially isolated” when it has been purified at least 2-fold, in particular at least 10-fold, more in particular at least 100-fold, and up to 1000-fold or more. A nucleic acid sequence or amino acid sequence that is “in essentially isolated form” is preferably essentially homogeneous, as determined using a suitable technique, such as a suitable chromatographical technique, such as polyacrylamide-gel electrophoresis;
[0397] k) The term “domain” as used herein generally refers to a globular region of an amino acid sequence (such as an antibody chain, and in particular to a globular region of a heavy chain antibody), or to a polypeptide that essentially consists of such a globular region. Usually, such a domain will comprise peptide loops (for example 3 or 4 peptide loops) stabilized, for example, as a sheet or by disulfide bonds. The term “binding domain” refers to such a domain that is directed against an antigenic determinant (as defined herein);
[0398] l) The term “antigenic determinant” refers to the epitope on the antigen recognized by the antigen-binding molecule (such as a Nanobody or a polypeptide of the invention) and more in particular by the antigen-binding site of said molecule. The terms “antigenic determinant” and “epitope” may also be used interchangeably herein.
[0399] m) An amino acid sequence (such as a Nanobody, an antibody, a polypeptide of the invention, or generally an antigen binding protein or polypeptide or a fragment thereof) that can (specifically) bind to, that has affinity for and/or that has specificity for a specific antigenic determinant, epitope, antigen or protein (or for at least one part, fragment or epitope thereof) is said to be “against” or “directed against” said antigenic determinant, epitope, antigen or protein.
[0400] n) The term “specificity” refers to the number of different types of antigens or antigenic determinants to which a particular antigen-binding molecule or antigen-binding protein (such as a Nanobody or a polypeptide of the invention) molecule can bind. The specificity of an antigen-binding protein can be determined based on affinity and/or avidity. The affinity, represented by the equilibrium constant for the dissociation of an antigen with an antigen-binding protein (K_{D}), is a measure for the binding strength between an antigenic determinant and an antigen-binding site on the antigen-binding protein: the lesser the value of the K_{D}, the stronger the binding strength between an antigenic determinant and the antigen-binding molecule (alternatively, the affinity can also be expressed as the affinity constant (K_{A}), which is 1/K_{D}). As will be clear to the skilled person (for example on the basis of the further disclosure herein), affinity can be determined in a manner known per se, depending on the specific antigen of interest. Avidity is the measure of the strength of binding between an antigen-binding molecule (such as a Nanobody or polypeptide of the invention) and the pertinent antigen. Avidity is related to both the affinity between an antigenic determinant and its antigen binding site on the antigen-binding molecule and the number of pertinent binding sites present on the antigen-binding molecule. Typically, antigen-binding proteins (such as the amino acid sequences, Nanobodies and/or polypeptides of the invention) will bind to their antigen with a dissociation constant (K_{D}) of 10⁻⁵ to 10⁻¹² moles/liter or less, and preferably 10⁻⁷ to 10⁻¹² moles/liter or less and more preferably 10⁻⁸ to 10⁻¹² moles/liter (i.e. with an association constant (K_{A}) of 10⁵ to 10¹² liter/moles or more, and preferably 10⁷ to 10¹² liter/moles or more and more preferably 10⁸ to 10¹² liter/moles). Any K_{D} value greater than 10⁴ mol/liter (or any K_{A} value lower than 10⁴ M⁻¹) liters/mol is generally considered to indicate non-specific binding. Preferably, a monovalent immunoglobulin sequence of the invention will bind to the desired antigen with an affinity less than 500 nM, preferably less than 200 nM, more preferably less than 10 nM, such as less than 500 pM. Specific binding of an antigen-binding protein to an antigen or antigenic determinant can be determined in any suitable manner known per se, including, for example, Scatchard analysis and/or competitive binding assays, such as radioimmunoassays (RIA), enzyme immunoassays (EIA) and sandwich competition assays, and the different variants thereof known per se in the art; as well as the other techniques mentioned herein.
The dissociation constant may be the actual or apparent dissociation constant, as will be clear to the skilled person. Methods for determining the dissociation constant will be clear to the skilled person, and for example include the techniques mentioned herein. In this respect, it will also be clear that it may not be possible to measure dissociation constants of more then 10⁻⁴ moles/liter or 10⁻³ moles/liter (e.g. of 10⁻² moles/liter). Optionally, as will also be clear to the skilled person, the (actual or apparent) dissociation constant may be calculated on the basis of the (actual or apparent) association constant (K_{A}), by means of the relationship [K_{D}=1/K_{A}].
The affinity denotes the strength or stability of a molecular interaction. The affinity is commonly given as by the K_{D}, or dissociation constant, which has units of mol/liter (or M). The affinity can also be expressed as an association constant, K_{A}, which equals 1/K_{D} and has units of (mol/liter)⁻¹ (or M⁻¹). In the present specification, the stability of the interaction between two molecules (such as an amino acid sequence, Nanobody or polypeptide of the invention and its intended target) will mainly be expressed in terms of the K_{D} value of their interaction; it being clear to the skilled person that in view of the relation K_{A}=1/K_{D}, specifying the strength of molecular interaction by its K_{D} value can also be used to calculate the corresponding K_{A} value. The K_{D}-value characterizes the strength of a molecular interaction also in a thermodynamic sense as it is related to the free energy (DG) of binding by the well known relation DG=RT·ln(K_{D}) (equivalently DG=−RT·ln(K_{A})), where R equals the gas constant, T equals the absolute temperature and ln denotes the natural logarithm.
The K_{D} for biological interactions which are considered meaningful (e.g. specific) are typically in the range of 10⁻¹⁰M (0.1 nM) to 10⁻⁵M (10000 nM). The stronger an interaction is, the lower is its K_{D}.
The K_{D} can also be expressed as the ratio of the dissociation rate constant of a complex, denoted as k_{off}, to the rate of its association, denoted kₒₙ (so that K_{D}=k_{off}/kₒₙ and K_{A}=kₒₙ/k_{off}). The off-rate k_{off} has units s⁻¹ (where s is the SI unit notation of second). The on-rate kₒₙ has units M⁻¹ s⁻¹. The on-rate may vary between 10² M⁻¹ s⁻¹ to about 10⁷ M⁻¹ s⁻¹, approaching the diffusion-limited association rate constant for bimolecular interactions. The off-rate is related to the half-life of a given molecular interaction by the relation t_{1/2}=ln(2)/k_{off}. The off-rate may vary between 10⁻⁶ s⁻¹ (near irreversible complex with a t_{1/2} of multiple days) to 1 s⁻¹ (t_{1/2}=0.69 s).
The affinity of a molecular interaction between two molecules can be measured via different techniques known per se, such as the well known surface plasmon resonance (SPR) biosensor technique (see for example Ober et al., Intern. Immunology, 13, 1551-1559, 2001) where one molecule is immobilized on the biosensor chip and the other molecule is passed over the immobilized molecule under flow conditions yielding kₒₙ, k_{off} measurements and hence K_{D} (or K_{A}) values. This can for example be performed using the well-known BIACORE instruments.
It will also be clear to the skilled person that the measured K_{D} may correspond to the apparent K_{D} if the measuring process somehow influences the intrinsic binding affinity of the implied molecules for example by artefacts related to the coating on the biosensor of one molecule. Also, an apparent K_{D} may be measured if one molecule contains more than one recognition sites for the other molecule. In such situation the measured affinity may be affected by the avidity of the interaction by the two molecules.
Another approach that may be used to assess affinity is the 2-step ELISA (Enzyme-Linked Immunosorbent Assay) procedure of Friguet et al. (J. Immunol. Methods, 77, 305-19, 1985). This method establishes a solution phase binding equilibrium measurement and avoids possible artefacts relating to adsorption of one of the molecules on a support such as plastic.
However, the accurate measurement of K_{D} may be quite labor-intensive and as consequence, often apparent K_{D} values are determined to assess the binding strength of two molecules. It should be noted that as long all measurements are made in a consistent way (e.g. keeping the assay conditions unchanged) apparent K_{D} measurements can be used as an approximation of the true K_{D} and hence in the present document K_{D} and apparent K_{D} should be treated with equal importance or relevance. Finally, it should be noted that in many situations the experienced scientist may judge it to be convenient to determine the binding affinity relative to some reference molecule. For example, to assess the binding strength between molecules A and B, one may e.g. use a reference molecule C that is known to bind to B and that is suitably labelled with a fluorophore or chromophore group or other chemical moiety, such as biotin for easy detection in an ELISA or FACS (Fluorescent activated cell sorting) or other format (the fluorophore for fluorescence detection, the chromophore for light absorption detection, the biotin for streptavidin-mediated ELISA detection). Typically, the reference molecule C is kept at a fixed concentration and the concentration of A is varied for a given concentration or amount of B. As a result an IC₅₀ value is obtained corresponding to the concentration of A at which the signal measured for C in absence of A is halved. Provided K_{D ref}, the K_{D} of the reference molecule, is known, as well as the total concentration c_{ref} of the reference molecule, the apparent K_{D} for the interaction A-B can be obtained from following formula: K_{D}=IC₅₀/(1+c_{ref}/K_{D ref}). Note that if c_{ref}<<K_{D ref}, K_{D}≈IC₅₀. Provided the measurement of the IC₅₀ is performed in a consistent way (e.g. keeping c_{ref} fixed) for the binders that are compared, the strength or stability of a molecular interaction can be assessed by the IC₅₀ and this measurement is judged as equivalent to K_{D} or to apparent K_{D} throughout this text.
[0401] o) The half-life of an amino acid sequence, compound or polypeptide of the invention can generally be defined as the time taken for the serum concentration of the amino acid sequence, compound or polypeptide to be reduced by 50%, in vivo, for example due to degradation of the sequence or compound and/or clearance or sequestration of the sequence or compound by natural mechanisms. The in vivo half-life of an amino acid sequence, compound or polypeptide of the invention can be determined in any manner known per se, such as by pharmacokinetic analysis. Suitable techniques will be clear to the person skilled in the art, and may for example generally involve the steps of suitably administering to a warm-blooded animal (i.e. to a human or to another suitable mammal, such as a mouse, rabbit, rat, pig, dog or a primate, for example monkeys from the genus Macaca (such as, and in particular, cynomologus monkeys (Macaca fascicularis) and/or rhesus monkeys (Macaca mulatta)) and baboon (Papio ursinus)) a suitable dose of the amino acid sequence, compound or polypeptide of the invention; collecting blood samples or other samples from said animal; determining the level or concentration of the amino acid sequence, compound or polypeptide of the invention in said blood sample; and calculating, from (a plot of) the data thus obtained, the time until the level or concentration of the amino acid sequence, compound or polypeptide of the invention has been reduced by 50% compared to the initial level upon dosing. Reference is for example made to the Experimental Part below, as well as to the standard handbooks, such as Kenneth, A et al: Chemical Stability of Pharmaceuticals: A Handbook for Pharmacists and Peters et al, Pharmacokinete analysis: A Practical Approach (1996). Reference is also made to “Pharmacokinetics”, M Gibaldi & D Perron, published by Marcel Dekker, 2nd Rev. edition (1982).
As will also be clear to the skilled person (see for example pages 6 and 7 of WO 04/003019 and in the further references cited therein), the half-life can be expressed using parameters such as the t1/2-alpha, t1/2-beta and the area under the curve (AUC). In the present specification, an “increase in half-life” refers to an increase in any one of these parameters, such as any two of these parameters, or essentially all three these parameters. As used herein “increase in half-life” or “increased half-life” in particular refers to an increase in the t1/2-beta, either with or without an increase in the t1/2-alpha and/or the AUC or both.
[0402] p) In the context of the present invention, “modulating” or “to modulate” generally means either reducing or inhibiting the activity of, or alternatively increasing the activity of, a target or antigen, as measured using a suitable in vitro, cellular or in vivo assay. In particular, “modulating” or “to modulate” may mean either reducing or inhibiting the activity of, or alternatively increasing a (relevant or intended) biological activity of, a target or antigen, as measured using a suitable in vitro, cellular or in vivo assay (which will usually depend on the target or antigen involved), by at least 1%, preferably at least 5%, such as at least 10% or at least 25%, for example by at least 50%, at least 60%, at least 70%, at least 80%, or 90% or more, compared to activity of the target or antigen in the same assay under the same conditions but without the presence of the construct of the invention.
As will be clear to the skilled person, “modulating” may also involve effecting a change (which may either be an increase or a decrease) in affinity, avidity, specificity and/or selectivity of a target or antigen for one or more of its ligands, binding partners, partners for association into a homomultimeric or heteromultimeric form, or substrates; and/or effecting a change (which may either be an increase or a decrease) in the sensitivity of the target or antigen for one or more conditions in the medium or surroundings in which the target or antigen is present (such as pH, ion strength, the presence of co-factors, etc.), compared to the same conditions but without the presence of the construct of the invention. As will be clear to the skilled person, this may again be determined in any suitable manner and/or using any suitable assay known per se, depending on the target or antigen involved.
“Modulating” may also mean effecting a change (i.e. an activity as an agonist, as an antagonist or as a reverse agonist, respectively, depending on the target or antigen and the desired biological or physiological effect) with respect to one or more biological or physiological mechanisms, effects, responses, functions, pathways or activities in which the target or antigen (or in which its substrate(s), ligand(s) or pathway(s) are involved, such as its signalling pathway or metabolic pathway and their associated biological or physiological effects) is involved. Again, as will be clear to the skilled person, such an action as an agonist or an antagonist may be determined in any suitable manner and/or using any suitable (in vitro and usually cellular or in assay) assay known per se, depending on the target or antigen involved. In particular, an action as an agonist or antagonist may be such that an intended biological or physiological activity is increased or decreased, respectively, by at least 1%, preferably at least 5%, such as at least 10% or at least 25%, for example by at least 50%, at least 60%, at least 70%, at least 80%, or 90% or more, compared to the biological or physiological activity in the same assay under the same conditions but without the presence of the construct of the invention.
Modulating may for example also involve allosteric modulation of the target or antigen; and/or reducing or inhibiting the binding of the target or antigen to one of its substrates or ligands and/or competing with a natural ligand, substrate for binding to the target or antigen. Modulating may also involve activating the target or antigen or the mechanism or pathway in which it is involved. Modulating may for example also involve effecting a change in respect of the folding or confirmation of the target or antigen, or in respect of the ability of the target or antigen to fold, to change its confirmation (for example, upon binding of a ligand), to associate with other (sub)units, or to disassociate.
Modulating may for example also involve effecting a change in the ability of the target or antigen to transport other compounds or to serve as a channel for other compounds (such as ions).
Modulating may be reversible or irreversible, but for pharmaceutical and pharmacological purposes will usually be in a reversible manner.
[0403] q) In respect of a target or antigen, the term “interaction site” on the target or antigen means a site, epitope, antigenic determinant, part, domain or stretch of amino acid residues on the target or antigen that is a site for binding to a ligand, receptor or other binding partner, a catalytic site, a cleavage site, a site for allosteric interaction, a site involved in multimerisation (such as homomerization or heterodimerization) of the target or antigen; or any other site, epitope, antigenic determinant, part, domain or stretch of amino acid residues on the target or antigen that is involved in a biological action or mechanism of the target or antigen. More generally, an “interaction site” can be any site, epitope, antigenic determinant, part, domain or stretch of amino acid residues on the target or antigen to which an amino acid sequence or polypeptide of the invention can bind such that the target or antigen (and/or any pathway, interaction, signalling, biological mechanism or biological effect in which the target or antigen is involved) is modulated (as defined herein).
[0404] r) An amino acid sequence or polypeptide is said to be “specific for” a first target or antigen compared to a second target or antigen when is binds to the first antigen with an affinity (as described above, and suitably expressed as a K_{D} value, K_{A} value, K_{off} rate and/or Kₒₙ rate) that is at least 10 times, such as at least 100 times, and preferably at least 1000 times, and up to 10.000 times or more better than the affinity with which said amino acid sequence or polypeptide binds to the second target or polypeptide. For example, the first antigen may bind to the target or antigen with a K_{D} value that is at least 10 times less, such as at least 100 times less, and preferably at least 1000 times less, such as 10.000 times less or even less than that, than the K_{D} with which said amino acid sequence or polypeptide binds to the second target or polypeptide. Preferably, when an amino acid sequence or polypeptide is “specific for” a first target or antigen compared to a second target or antigen, it is directed against (as defined herein) said first target or antigen, but not directed against said second target or antigen.
[0405] s) The terms “cross-block”, “cross-blocked” and “cross-blocking” are used interchangeably herein to mean the ability of an amino acid sequence or other binding agents (such as a Nanobody, polypeptide or compound or construct of the invention) to interfere with the binding of other amino acid sequences or binding agents of the invention to a given target. The extend to which an amino acid sequence or other binding agents of the invention is able to interfere with the binding of another to HER2, and therefore whether it can be said to cross-block according to the invention, can be determined using competition binding assays. One particularly suitable quantitative cross-blocking assay uses a Biacore instrument which can measure the extent of interactions using surface plasmon resonance technology. Another suitable quantitative cross-blocking assay uses an ELISA-based approach to measure competition between amino acid sequences or other binding agents in terms of their binding to the target. The following generally describes a suitable Biacore assay for determining whether an amino acid sequence or other binding agent cross-blocks or is capable of cross-blocking according to the invention. It will be appreciated that the assay can be used with any of the amino acid sequences or other binding agents described herein. The Biacore machine (for example the Biacore 3000) is operated in line with the manufacturer's recommendations. Thus in one cross-blocking assay, the target protein is coupled to a CM5 Biacore chip using standard amine coupling chemistry to generate a surface that is coated with the target. Typically 200-800 resonance units of the target would be coupled to the chip (an amount that gives easily measurable levels of binding but that is readily saturable by the concentrations of test reagent being used). Two test amino acid sequences (termed A* and B*) to be assessed for their ability to cross-block each other are mixed at a one to one molar ratio of binding sites in a suitable buffer to create the test mixture. When calculating the concentrations on a binding site basis the molecular weight of an amino acid sequence is assumed to be the total molecular weight of the amino acid sequence divided by the number of target binding sites on that amino acid sequence. The concentration of each amino acid sequence in the test mix should be high enough to readily saturate the binding sites for that amino acid sequence on the target molecules captured on the Biacore chip. The amino acid sequences in the mixture are at the same molar concentration (on a binding basis) and that concentration would typically be between 1.00 and 1.5 micromolar (on a binding site basis). Separate solutions containing A* alone and B* alone are also prepared. A* and B* in these solutions should be in the same buffer and at the same concentration as in the test mix. The test mixture is passed over the target-coated. Biacore chip and the total amount of binding recorded. The chip is then treated in such a way as to remove the bound amino acid sequences without damaging the chip-bound target. Typically this is done by treating the chip with 30 mM HCl for 60 seconds. The solution of A* alone is then passed over the target-coated surface and the amount of binding recorded. The chip is again treated to remove all of the bound amino acid sequences without damaging the chip-bound target. The solution of B* alone is then passed over the target-coated surface and the amount of binding recorded. The maximum theoretical binding of the mixture of A* and B* is next calculated, and is the sum of the binding of each amino acid sequence when passed over the target surface alone. If the actual recorded binding of the mixture is less than this theoretical maximum then the two amino acid sequences are cross-blocking each other. Thus, in general, a cross-blocking amino acid sequence or other binding agent according to the invention is one which will bind to the target in the above Biacore cross-blocking assay such that during the assay and in the presence of a second amino acid sequence or other binding agent of the invention the recorded binding is between 80% and 0.1% (e.g. 80% to 4%) of the maximum theoretical binding, specifically between 75% and 0.1% (e.g. 75% to 4%) of the maximum theoretical binding, and more specifically between 70% and 0.1% (e.g. 70% to 4%) of maximum theoretical binding (as just defined above) of the two amino acid sequences or binding agents in combination. The Biacore assay described above is a primary assay used to determine if amino acid sequences or other binding agents cross-block each other according to the invention. On rare occasions particular amino acid sequences or other binding agents may not bind to target coupled via amine chemistry to a CM5 Biacore chip (this usually occurs when the relevant binding site on target is masked or destroyed by the coupling to the chip). In such cases cross-blocking can be determined using a tagged version of the target, for example a N-terminal His-tagged version. In this particular format, an anti-His amino acid sequence would be coupled to the Biacore chip and then the His-tagged target would be passed over the surface of the chip and captured by the anti-His amino acid sequence. The cross blocking analysis would be carried out essentially as described above, except that after each chip regeneration cycle, new His-tagged target would be loaded back onto the anti-His amino acid sequence coated surface. In addition to the example given using N-terminal His-tagged [target], C-terminal His-tagged target could alternatively be used. Furthermore, various other tags and tag binding protein combinations that are known in the art could be used for such a cross-blocking analysis (e.g. HA tag with anti-HA antibodies; FLAG tag with anti-FLAG antibodies; biotin tag with streptavidin).
The following generally describes an ELISA assay for determining whether an amino acid sequence or other binding agent directed against a target cross-blocks or is capable of cross-blocking as defined herein. It will be appreciated that the assay can be used with any of the amino acid sequences (or other binding agents such as polypeptides of the invention) described herein. The general principal of the assay is to have an amino acid sequence or binding agent that is directed against the target coated onto the wells of an ELISA plate. An excess amount of a second, potentially cross-blocking, anti-target amino acid sequence is added in solution (i.e. not bound to the ELISA plate). A limited amount of the target is then added to the wells. The coated amino acid sequence and the amino acid sequence in solution compete for binding of the limited number of target molecules. The plate is washed to remove excess target that has not been bound by the coated amino acid sequence and to also remove the second, solution phase amino acid sequence as well as any complexes formed between the second, solution phase amino acid sequence and target. The amount of bound target is then measured using a reagent that is appropriate to detect the target. An amino acid sequence in solution that is able to cross-block the coated amino acid sequence will be able to cause a decrease in the number of target molecules that the coated amino acid sequence can bind relative to the number of target molecules that the coated amino acid sequence can bind in the absence of the second, solution phase, amino acid sequence. In the instance where the first amino acid sequence, e.g. an Ab-X, is chosen to be the immobilized amino acid sequence, it is coated onto the wells of the ELISA plate, after which the plates are blocked with a suitable blocking solution to minimize non-specific binding of reagents that are subsequently added. An excess amount of the second amino acid sequence, i.e. Ab-Y, is then added to the ELISA plate such that the moles of Ab-Y target binding sites per well are at least 10 fold higher than the moles of Ab-X target binding sites that were used, per well, during the coating of the ELISA plate. Target is then added such that the moles of target added per well are at least 25-fold lower than the moles of Ab-X target binding sites that were used for coating each well. Following a suitable incubation period the ELISA plate is washed and a reagent for detecting the target is added to measure the amount of target specifically hound by the coated anti-target amino acid sequence (in this case Ab-X). The background signal for the assay is defined as the signal obtained in wells with the coated amino acid sequence (in this case Ab-X), second solution phase amino acid sequence (in this case Ab-Y), target] buffer only (i.e. without target) and target detection reagents. The positive control signal for the assay is defined as the signal obtained in wells with the coated amino acid sequence (in this case Ab-X), second solution phase amino acid sequence buffer only (i.e. without second solution phase amino acid sequence), target and target detection reagents. The ELISA assay may be run in such a manner so as to have the positive control signal be at least 6 times the background signal. To avoid any artefacts (e.g. significantly different affinities between Ab-X and Ab-Y for the target) resulting from the choice of which amino acid sequence to use as the coating amino acid sequence and which to use as the second (competitor) amino acid sequence, the cross-blocking assay may to be run in two formats: 1) format 1 is where Ab-X is the amino acid sequence that is coated onto the ELISA plate and Ab-Y is the competitor amino acid sequence that is in solution and 2) format 2 is where Ab-Y is the amino acid sequence that is coated onto the ELISA plate and Ab-X is the competitor amino acid sequence that is in solution. Ab-X and Ab-Y are defined as cross-blocking if, either in format 1 or in format 2, the solution phase anti-target amino acid sequence is able to cause a reduction of between 60% and 100%, specifically between 70% and 100%, and more specifically between 80% and 100%, of the target detection signal {i.e. the amount of target bound by the coated amino acid sequence) as compared to the target detection signal obtained in the absence of the solution phase anti-target amino acid sequence (i.e. the positive control wells).
[0406] t) An amino acid sequence is said to be “cross-reactive” for two different antigens or antigenic determinants (such as serum albumin from two different species of mammal, such as human serum albumin and cyno serum albumin) if it is specific for (as defined herein) both these different antigens or antigenic determinants.
[0407] u) By binding that is “essentially independent of the pH” is generally meant herein that the association constant (K_{A}) of the amino acid sequence with respect to the serum protein (such as serum albumin) at the pH value(s) that occur in a cell of an animal or human body (as further described herein) is at least 5%, such as at least 10%, preferably at least 25%, more preferably at least 50%, even more preferably at least 60%, such as even more preferably at least 70%, such as at least 80% or 90% or more (or even more than 100%, such as more than 110%, more than 120% or even 130% or more, or even more than 150%, or even more than 200%) of the association constant (K_{A}) of the amino acid sequence with respect to the same serum protein at the pH value(s) that occur outside said cell. Alternatively, by binding that is “essentially independent of the pH” is generally meant herein that the k_{off} rate (measured by Biacore) of the amino acid sequence with respect to the serum protein (such as serum albumin) at the pH value(s) that occur in a cell of an animal or human body (as e.g. further described herein, e.g. pH around 5.5, e.g. 5.3 to 5.7) is at least 5%, such as at least 10%, preferably at least 25%, more preferably at least 50%, even more preferably at least 60%, such as even more preferably at least 70%, such as at least 80% or 90% or more (or even more than 100%, such as more than 110%, more than 120% or even 130% or more, or even more than 150%, or even more than 200%) of the k_{off} rate of the amino acid sequence with respect to the same serum protein at the pH value(s) that occur outside said cell, e.g. pH 7.2 to 7.4. By “the pH value(s) that occur in a cell of an animal or human body” is meant the pH value(s) that may occur inside a cell, and in particular inside a cell that is involved in the recycling of the serum protein. In particular, by “the pH value(s) that occur in a cell of an animal or human body” is meant the pH value(s) that may occur inside a (sub)cellular compartment or vesicle that is involved in recycling of the serum protein (e.g. as a result of pinocytosis, endocytosis, transcytosis, exocytosis and phagocytosis or a similar mechanism of uptake or internalization into said cell), such as an endosome, lysosome or pinosome.
[0408] v) As further described herein, the total number of amino acid residues in a Nanobody can be in the region of 110-120, is preferably 112-115, and is most preferably 113. It should however be noted that parts, fragments, analogs or derivatives (as further described herein) of a Nanobody are not particularly limited as to their length and/or size, as long as such parts, fragments, analogs or derivatives meet the further requirements outlined herein and are also preferably suitable for the purposes described herein;
[0409] w) The amino acid residues of a Nanobody are numbered according to the general numbering for V_{H} domains given by Kabat et al. (“Sequence of proteins of immunological interest”, US Public Health Services, NIH Bethesda, Md., Publication No. 91), as applied to V_{HH} domains from Camelids in the article of Riechmann and Muyldermans, J. Immunol. Methods 2000 Jun. 23; 240 (1-2): 185-195 (see for example FIG. 2 of this publication); or referred to herein. According to this numbering, FR1 of a Nanobody comprises the amino acid residues at positions 1-30, CDR1 of a Nanobody comprises the amino acid residues at positions 31-35, FR2 of a Nanobody comprises the amino acids at positions 36-49, CDR2 of a Nanobody comprises the amino acid residues at positions 50-65, FR3 of a Nanobody comprises the amino acid residues at positions 66-94, CDR3 of a Nanobody comprises the amino acid residues at positions 95-102, and FR4 of a Nanobody comprises the amino acid residues at positions 103-113. [In this respect, it should be noted that—as is well known in the art for V_{H} domains and for V_{HH} domains—the total number of amino acid residues in each of the CDR's may vary and may not correspond to the total number of amino acid residues indicated by the Kabat numbering (that is, one or more positions according to the Kabat numbering may not be occupied in the actual sequence, or the actual sequence may contain more amino acid residues than the number allowed for by the Kabat numbering). This means that, generally, the numbering according to Kabat may or may not correspond to the actual numbering of the amino acid residues in the actual sequence. Generally, however, it can be said that, according to the numbering of Kabat and irrespective of the number of amino acid residues in the CDR's, position I according to the Kabat numbering corresponds to the start of FR1 and vice versa, position 36 according to the Kabat numbering corresponds to the start of FR2 and vice versa, position 66 according to the Kabat numbering corresponds to the start of FR3 and vice versa, and position 103 according to the Kabat numbering corresponds to the start of FR4 and vice versa].
Alternative methods for numbering the amino acid residues of V_{H} domains, which methods can also be applied in an analogous manner to V_{HH} domains from Camelids and to Nanobodies, are the method described by Chothia et al. (Nature 342, 877-883 (1989)), the so-called “AbM definition” and the so-called “contact definition”. However, in the present description, claims and figures, the numbering according to Kabat as applied to V_{HH} domains by Riechmann and Muyldermans will be followed, unless indicated otherwise; and
[0410] x) The Figures, Sequence Listing and the Experimental Part/Examples are only given to further illustrate the invention and should not be interpreted or construed as limiting the scope of the invention and/or of the appended claims in any way, unless explicitly indicated otherwise herein.

[0411] For a general description of heavy chain antibodies and the variable domains thereof, reference is inter alia made to the prior art cited herein, to the review article by Muyldermans in Reviews in Molecular Biotechnology 74(2001), 277-302; as well as to the following patent applications, which are mentioned as general background art: WO 94/04678, WO 95/04079 and WO 96/34103 of the Vrije Universiteit Brussel; WO 94/25591, WO 99/37681, WO 00/40968, WO 00/43507, WO 00/65057, WO 01/40310, WO 01/44301, EP 1134231 and WO 02/48193 of Unilever; WO 97/49805, WO 01/21817, WO 03/035694, WO 03/054016 and WO 03/055527 of the Vlaams Instituut voor Biotechnologie (VIB); WO 03/050531 of Algonomics N.V. and Ablynx N.V.; WO 01/90190 by the National Research Council of Canada; WO 03/025020 (=EP 1 433 793) by the Institute of Antibodies; as well as WO 04/041867, WO 04/041862, WO 04/041865, WO 04/041863, WO 04/062551, WO 05/044858, WO 06/40153, WO 06/079372, WO 06/122786, WO 06/122787 and WO 06/122825, by Ablynx N.V. and the further published patent applications by Ablynx N.V. Reference is also made to the further prior art mentioned in these applications, and in particular to the list of references mentioned on pages 41-43 of the International application WO 06/040153, which list and references are incorporated herein by reference.

[0412] In accordance with the terminology used in the art (see the above references), the variable domains present in naturally occurring heavy chain antibodies will also be referred to as “V_{HH} domains”, in order to distinguish them from the heavy chain variable domains that are present in conventional 4-chain antibodies (which will be referred to hereinbelow as “V_{H} domains”) and from the light chain variable domains that are present in conventional 4-chain antibodies (which will be referred to hereinbelow as “V_{L} domains”).

[0413] As mentioned in the prior art referred to above, V_{HH} domains have a number of unique structural characteristics and functional properties which make isolated V_{HH} domains (as well as Nanobodies based thereon, which share these structural characteristics and functional properties with the naturally occurring V_{HH} domains) and proteins containing the same highly advantageous for use as functional antigen-binding domains or proteins. In particular, and without being limited thereto, V_{HH} domains (which have been “designed” by nature to functionally bind to an antigen without the presence of, and without any interaction with, a light chain variable domain) and Nanobodies can function as a single, relatively small, functional antigen-binding structural unit, domain or protein. This distinguishes the V_{HH} domains from the V_{H} and V_{L} domains of conventional 4-chain antibodies, which by themselves are generally not suited for practical application as single antigen-binding proteins or domains, but need to be combined in some form or another to provide a functional antigen-binding unit (as in for example conventional antibody fragments such as Fab fragments; in ScFv's fragments, which consist of a V_{H} domain covalently linked to a V_{L} domain).

[0414] Because of these unique properties, the use of V_{HH} domains and Nanobodies as single antigen-binding proteins or as antigen-binding domains (i.e. as part of a larger protein or polypeptide) offers a number of significant advantages over the use of conventional V_{H} and V_{L}, domains, scFv's or conventional antibody fragments (such as Fab- or F(ab′)₂-fragments):
[0415] only a single domain is required to bind an antigen with high affinity and with high selectivity, so that there is no need to have two separate domains present, nor to assure that these two domains are present in the right spatial conformation and configuration (i.e. through the use of especially designed linkers, as with scFv's);
[0416] V_{HH} domains and Nanobodies can be expressed from a single gene and require no post-translational folding or modifications;
[0417] V_{HH} domains and Nanobodies can easily be engineered into multivalent and multispecific formats (as further discussed herein);
[0418] V_{HH} domains and Nanobodies are highly soluble and do not have a tendency to aggregate (as with the mouse-derived “dAb's” described by Ward et al., Nature, Vol. 341, 1989, p. 544);
[0419] V_{HH} domains and Nanobodies are highly stable to heat, pH, proteases and other denaturing agents or conditions (see for example Ewert et al, supra);
[0420] V_{HH} domains and Nanobodies are easy and relatively cheap to prepare, even on a scale required for production. For example, V_{HH} domains, Nanobodies and proteins/polypeptides containing the same can be produced using microbial fermentation (e.g. as further described below) and do not require the use of mammalian expression systems, as with for example conventional antibody fragments;
[0421] V_{HH} domains and Nanobodies are relatively small (approximately 15 kDa, or 10 times smaller than a conventional IgG) compared to conventional 4-chain antibodies and antigen-binding fragments thereof, and therefore show high(er) penetration into tissues (including but not limited to solid tumors and other dense tissues) than such conventional 4-chain antibodies and antigen-binding fragments thereof;

[0422] V_{HH} domains and Nanobodies can show so-called cavity-binding properties (inter alia due to their extended CDR3 loop, compared to conventional V_{H} domains) and can therefore also access targets and epitopes not accessible to conventional 4-chain antibodies and antigen-binding fragments thereof. For example, it has been shown that V_{HH} domains and Nanobodies can inhibit enzymes (see for example WO 97/49805; Transue et al., Proteins 1998 Sep. 1; 32(4): 515-22; Lauwereys et al., EMBO J. 1998 Jul. 1; 17(13): 3512-20).

[0423] In a specific and preferred aspect, the invention provides Nanobodies against HER2, and in particular Nanobodies against HER2 from a warm-blooded animal, and more in particular Nanobodies against HER2 from a mammal, and especially Nanobodies against human HER2; as well as proteins and/or polypeptides comprising at least one such Nanobody.

[0424] In particular, the invention provides Nanobodies against HER2, and proteins and/or polypeptides comprising the same, that have improved therapeutic and/or pharmacological properties and/or other advantageous properties (such as, for example, improved ease of preparation and/or reduced costs of goods), compared to conventional antibodies against HER2 or fragments thereof, compared to constructs that could be based on such conventional antibodies or antibody fragments (such as Fab′ fragments, F(ab′)₂ fragments, ScFv constructs, “diabodies” and other multispecific constructs (see for example the review by Holliger and Hudson, Nat. Biotechnol. 2005 September; 23(9):1126-36)), and also compared to the so-called “dAb's” or similar (single) domain antibodies that may be derived from variable domains of conventional antibodies. These improved and advantageous properties will become clear from the further description herein, and for example include, without limitation, one or more of:
[0425] increased affinity and/or avidity for HER2, either in a monovalent format, in a multivalent format (for example in a bivalent format) and/or in a multispecific format (for example one of the multispecific formats described hereinbelow);
[0426] better suitability for formatting in a multivalent format (for example in a bivalent format);
[0427] better suitability for formatting in a multispecific format (for example one of the multispecific formats described hereinbelow);
[0428] improved suitability or susceptibility for “humanizing” substitutions (as defined herein);
[0429] less immunogenicity, either in a monovalent format, in a multivalent format (for example in a bivalent format) and/or in a multispecific format (for example one of the multispecific formats described hereinbelow);
[0430] increased stability, either in a monovalent format, in a multivalent format (for example in a bivalent format) and/or in a multispecific format (for example one of the multispecific formats described hereinbelow);
[0431] increased specificity towards HER2, either in a monovalent format, in a multivalent format (for example in a bivalent format) and/or in a multispecific format (for example one of the multispecific formats described hereinbelow);
[0432] decreased or where desired increased cross-reactivity with HER2 from different species;
   and/or
[0433] one or more other improved properties desirable for pharmaceutical use (including prophylactic use and/or therapeutic use) and/or for diagnostic use (including but not limited to use for imaging purposes), either in a monovalent format, in a multivalent format (for example in a bivalent format) and/or in a multispecific format (for example one of the multispecific formats described hereinbelow).

[0434] As generally described herein for the amino acid sequences of the invention, the Nanobodies of the invention are preferably in essentially isolated form (as defined herein), or form part of a protein or polypeptide of the invention (as defined herein), which may comprise or essentially consist of one or more Nanobodies of the invention and which may optionally further comprise one or more further amino acid sequences (all optionally linked via one or more suitable linkers). For example, and without limitation, the one or more amino acid sequences of the invention may be used as a binding unit in such a protein or polypeptide, which may optionally contain one or more further amino acid sequences that can serve as a binding unit (i.e. against one or more other antigenic determinants on HER2 and/or against one or more other targets than HER2), so as to provide a monovalent, multivalent, multiparatopic or multispecific polypeptide of the invention, respectively, all as described herein. In particular, such a protein or polypeptide may comprise or essentially consist of one or more Nanobodies of the invention and optionally one or more (other) Nanobodies (i.e. directed against one or more other antigenic determinants on HER2 and/or against other targets than HER2), all optionally linked via one or more suitable linkers, so as to provide a monovalent, multivalent, multiparatopic or multispecific Nanobody construct, respectively, as further described herein. Such proteins or polypeptides may also be in essentially isolated form (as defined herein).

[0435] In a Nanobody of the invention, the binding site for binding against HER2 is preferably formed by the CDR sequences. Optionally, a Nanobody of the invention may also, and in addition to the at least one binding site for binding against HER2, contain one or more further binding sites for binding against other antigens, proteins or targets. For methods and positions for introducing such second binding sites, reference is for example made to Keck and Huston, Biophysical Journal, 71, October 1996, 2002-2011; EP 0 640 130; and WO 06/07260.

[0436] As generally described herein for the amino acid sequences of the invention, when a Nanobody of the invention (or a polypeptide of the invention comprising the same) is intended for administration to a subject (for example for therapeutic and/or diagnostic purposes as described herein), it is preferably directed against human HER2; whereas for veterinary purposes, it is preferably directed against HER2 from the species to be treated.

[0437] Also, as with the amino acid sequences of the invention, a Nanobody of the invention may or may not be cross-reactive (i.e. directed against HER2 from two or more species of mammal, such as against human HER2 and HER2 from at least one of the species of mammal mentioned herein).

[0438] Also, again as generally described herein for the amino acid sequences of the invention, the Nanobodies of the invention may generally be directed against any antigenic determinant, epitope, part, domain, subunit or confirmation (where applicable) of HER2 However, it is generally assumed and preferred that the Nanobodies of the invention (and polypeptides comprising the same) are directed against the Herceptin® binding site on HER2 or the Omnitarg binding site on HER2.

[0439] As already described herein, the amino acid sequence and structure of a Nanobody can be considered—without however being limited thereto—to be comprised of four framework regions or “FR's” (or sometimes also referred to as “FW's”), which are referred to in the art and herein as “Framework region 1” or “FR1”; as “Framework region 2” or “FR2”; as “Framework region 3” or “FR3”; and as “Framework region 4” or “FR4”, respectively; which framework regions are interrupted by three complementary determining regions or “CDR's”, which are referred to in the art as “Complementarity Determining Region 1” or “CDR1”; as “Complementarity Determining Region 2” or “CDR2”; and as “Complementarity Determining Region 3” or “CDR3”, respectively. Some preferred framework sequences and CDR's (and combinations thereof) that are present in the Nanobodies of the invention are as described herein. Other suitable CDR sequences can be obtained by the methods described herein.

[0440] According to a non-limiting but preferred aspect of the invention, (the CDR sequences present in) the Nanobodies of the invention are such that:
[0441] the Nanobodies can bind to HER2 with a dissociation constant (K_{D}) of 10⁻⁵ to 10⁻¹² moles/liter or less, and preferably 10⁻⁷ to 10⁻¹² moles/liter or less and more preferably 10⁻⁸ to 10⁻¹² moles/liter (i.e. with an association constant (K_{A}) of 10⁵ to 10¹² liter/moles or more, and preferably 10⁷ to 10¹² liter/moles or more and more preferably 10⁸ to 10¹² liter/moles);
   and/or such that:
[0442] the Nanobodies can bind to HER2 with a kₒₙ-rate of between 10² M⁻¹ s⁻¹ to about 10⁷ M⁻¹ s⁻¹, preferably between 10³ M⁻¹ s⁻¹ and 10⁷ M⁻¹ s⁻¹, more preferably between 10⁴ M⁻¹ s⁻¹ and 10⁷ M⁻¹ s⁻¹, such as between 10⁵ M⁻¹ s⁻¹ and 10⁷ M⁻¹ s⁻¹;
   and/or such that they:
[0443] the Nanobodies can bind to HER2 with a k_{off} rate between 1 s⁻¹ (t_{1/2}=0.69 s) and 10⁻⁶ s⁻¹ (providing a near irreversible complex with a t_{1/2} of multiple days), preferably between 10⁻² s⁻¹ and 10⁻⁶ s⁻¹, more preferably between 10⁻³ s⁻¹ and 10⁻⁶ s⁻¹, such as between 10⁻⁴ s⁻¹ and 10⁻⁶ s⁻¹.

[0444] Preferably, (the CDR sequences present in) the Nanobodies of the invention are such that: a monovalent Nanobody of the invention (or a polypeptide that contains only one Nanobody of the invention) is preferably such that it will bind to HER2 with an affinity less than 500 nM, preferably less than 200 nM, more preferably less than 10 nM, such as less than 500 μM.

[0445] The affinity of the Nanobody of the invention against HER2 can be determined in a manner known per se, for example using the general techniques for measuring K_{D}. K_{A}, k_{off} or kₒₙ mentioned herein, as well as some of the specific assays described herein.

[0446] Some preferred IC₅₀ values for binding of the Nanobodies of the invention (and of polypeptides comprising the same) to HER2 will become clear from the further description and examples herein.

[0447] In a preferred but non-limiting aspect, the invention relates to a Nanobody (as defined herein) against HER2, which consists of 4 framework regions (FR1 to FR4 respectively) and 3 complementarity determining regions (CDR1 to CDR3 respectively), in which:

[0448] CDR1 is chosen from the group consisting of:
[0449] a) the amino acid sequences of SEQ ID NO's: 401-675;
[0450] b) amino acid sequences that have at least 80% amino acid identity with at least one of the amino acid sequences of SEQ ID NO's: 401-675;
[0451] c) amino acid sequences that have 3, 2, or 1 amino acid difference with at least one of the amino acid sequences of SEQ ID NO's: 401-675;
   and/or

[0452] CDR2 is chosen from the group consisting of:
[0453] d) the amino acid sequences of SEQ ID NO's: 951-1225;
[0454] e) amino acid sequences that have at least 80% amino acid identity with at least one of the amino acid sequences of SEQ ID NO's: 951-1225;
[0455] f) amino acid sequences that have 3, 2, or 1 amino acid difference with at least one of the amino acid sequences of SEQ ID NO's: 951-1225;
   and/or

[0456] CDR3 is chosen from the group consisting of:
[0457] g) the amino acid sequences of SEQ ID NO's: 1501-1775;
[0458] h) amino acid sequences that have at least 80% amino acid identity with at least one of the amino acid sequences of SEQ ID NO's: 1501-1775;
[0459] i) amino acid sequences that have 3, 2, or 1 amino acid difference with at least one of the amino acid sequences of SEQ ID NO's: 1501-1775;
   or any suitable fragment of such an amino acid sequence.

[0460] In particular, according to this preferred but non-limiting aspect, the invention relates to a Nanobody (as defined herein) against HER2, which consists of 4 framework regions (FR1 to FR4 respectively) and 3 complementarity determining regions (CDR1 to CDR3 respectively), in which:

[0461] CDR1 is chosen from the group consisting of:
[0462] a) the amino acid sequences of SEQ ID NO's: 401-675;
[0463] b) amino acid sequences that have at least 80% amino acid identity with at least one of the amino acid sequences of SEQ ID NO's: 401-675;
[0464] c) amino acid sequences that have 3, 2, or 1 amino acid difference with at least one of the amino acid sequences of SEQ ID NO's: 401-675;
   and

[0465] CDR2 is chosen from the group consisting of:
[0466] d) the amino acid sequences of SEQ ID NO's: 951-1225;
[0467] e) amino acid sequences that have at least 80% amino acid identity with at least one of the amino acid sequences of SEQ ID NO's: 951-1225;
[0468] f) amino acid sequences that have 3, 2, or 1 amino acid difference with at least one of the amino acid sequences of SEQ ID NO's: 951-1225;
   and

[0469] CDR3 is chosen from the group consisting of:
[0470] g) the amino acid sequences of SEQ ID NO's: 1501-1775;
[0471] h) amino acid sequences that have at least 80% amino acid identity with at least one of the amino acid sequences of SEQ ID NO's: 1501-1775;
[0472] i) amino acid sequences that have 3, 2, or 1 amino acid difference with at least one of the amino acid sequences of SEQ ID NO's: 1501-1775;
   or any suitable fragment of such an amino acid sequences.

[0473] As generally mentioned herein for the amino acid sequences of the invention, when a Nanobody of the invention contains one or more CDR1 sequences according to b) and/or c):
[0474] i) any amino acid substitution in such a CDR according to b) and/or c) is preferably, and compared to the corresponding CDR according to a), a conservative amino acid substitution (as defined herein);
   and/or
[0475] ii) the CDR according to b) and/or c) preferably only contains amino acid substitutions, and no amino acid deletions or insertions, compared to the corresponding CDR according to a);
   and/or
[0476] iii) the CDR according to b) and/or c) may be a CDR that is derived from a CDR according to a) by means of affinity maturation using one or more techniques of affinity maturation known per se.

[0477] Similarly, when a Nanobody of the invention contains one or more CDR2 sequences according to e) and/or f):
[0478] i) any amino acid substitution in such a CDR according to e) and/or 1) is preferably, and compared to the corresponding CDR according to d), a conservative amino acid substitution (as defined herein);
   and/or
[0479] ii) the CDR according to e) and/or f) preferably only contains amino acid substitutions, and no amino acid deletions or insertions, compared to the corresponding CDR according to d);
   and/or
[0480] iii) the CDR according to e) and/or f) may be a CDR that is derived from a CDR according to d) by means of affinity maturation using one or more techniques of affinity maturation known per se.

[0481] Also, similarly, when a Nanobody of the invention contains one or more CDR3 sequences according to h) and/or i):
[0482] i) any amino acid substitution in such a CDR according to h) and/or i) is preferably, and compared to the corresponding CDR according to g), a conservative amino acid substitution (as defined herein);
   and/or
[0483] ii) the CDR according to h) and/or i) preferably only contains amino acid substitutions, and no amino acid deletions or insertions, compared to the corresponding CDR according to g);
   and/or
[0484] iii) the CDR according to h) and/or i) may be a CDR that is derived from a CDR according to g) by means of affinity maturation using one or more techniques of affinity maturation known per se.

[0485] It should be understood that the last three paragraphs generally apply to any Nanobody of the invention that comprises one or more CDR1 sequences, CDR2 sequences and/or CDR3 sequences according to b), c), e), f), h) or i), respectively.

[0486] Of the Nanobodies of the invention, Nanobodies comprising one or more of the CDR's explicitly listed above are particularly preferred; Nanobodies comprising two or more of the CDR's explicitly listed above are more particularly preferred; and Nanobodies comprising three of the CDR's explicitly listed above are most particularly preferred.

[0487] Some particularly preferred, but non-limiting combinations of CDR sequences, as well as preferred combinations of CDR sequences and framework sequences, are mentioned in Table A-1 below, which lists the CDR sequences and framework sequences that are present in a number of preferred (but non-limiting) Nanobodies of the invention. As will be clear to the skilled person, a combination of CDR1, CDR2 and CDR3 sequences that occur in the same clone (i.e. CDR1, CDR2 and CDR3 sequences that are mentioned on the same line in Table A-1) will usually be preferred (although the invention in its broadest sense is not limited thereto, and also comprises other suitable combinations of the CDR sequences mentioned in Table A-1). Also, a combination of CDR sequences and framework sequences that occur in the same clone (i.e. CDR sequences and framework sequences that are mentioned on the same line in Table A-1) will usually be preferred (although the invention in its broadest sense is not limited thereto, and also comprises other suitable combinations of the CDR sequences and framework sequences mentioned in Table A-1, as well as combinations of such CDR sequences and other suitable framework sequences, e.g. as further described herein).

[0488] Also, in the Nanobodies of the invention that comprise the combinations of CDR's mentioned in Table A-1, each CDR can be replaced by a CDR chosen from the group consisting of amino acid sequences that have at least 80%, preferably at least 90%, more preferably at least 95%, even more preferably at least 99% sequence identity (as defined herein) with the mentioned CDR's; in which:
[0489] i) any amino acid substitution in such a CDR is preferably, and compared to the corresponding CDR sequence mentioned in Table A-1, a conservative amino acid substitution (as defined herein);
   and/or
[0490] ii) any such CDR sequence preferably only contains amino acid substitutions, and no amino acid deletions or insertions, compared to the corresponding CDR sequence mentioned in Table A-1;
   and/or
[0491] iii) any such CDR sequence is a CDR that is derived by means of a technique for affinity maturation known per se, and in particular starting from the corresponding CDR sequence mentioned in Table A-1.

[0492] However, as will be clear to the skilled person, the (combinations of) CDR sequences, as well as (the combinations of) CDR sequences and framework sequences mentioned in Table A-1 will generally be preferred.

TABLE A-1

Preferred combinations of CDR sequences, preferred
combinations of framework sequences, and preferred combinations
of framework and CDR sequences.
(“ID” refers to the SEQ ID NO in the attached sequence listing)

| Clone | ID | FR1 | ID | CDR 1 | ID | FR2 | ID | CDR 2 | ID |
|---|---|---|---|---|---|---|---|---|---|
| 13D11 | 126 | EVQLVESGGGLV | 401 | DYGMT | 676 | WVRRAPGK | 951 | SINWSGTHTDY | 1226 |
| | | HPGGSLRLSCVG | | | | GLEWVS | | ADSVKG | |
| | | SGFSLD | | | | | | | |
| 264 | 127 | EVQLVESGGGLV | 402 | DYAMT | 677 | WVRQAPGK | 952 | SINWSGTHTDY | 1227 |
| | | QPGGSLRLSCVG | | | | GLEWVS | | ADSVKG | |
| | | SGFSLD | | | | | | | |
| 2G2 | 128 | EVQLVESGGGLV | 403 | DYGMT | 678 | WVRQAPGK | 953 | SINWSGTHTDY | 1228 |
| | | QPGGSLRLSCVA | | | | GLEWVS | | TDPVKG | |
| | | SGFSLD | | | | | | | |
| 13D2 | 129 | EVQLVESGGGLV | 404 | DYGMT | 679 | WVRQAPGK | 954 | SINWSGTHTDY | 1229 |
| | | QPGGSLRLSCVA | | | | GLEWVS | | ADSVKG | |
| | | SGFSLD | | | | | | | |
| 2D5 | 130 | EVQLVESGGGLV | 405 | DYGMT | 680 | WVRQAPGK | 955 | SINWSGTHTDY | 1230 |
| | | QPGGSLRLSCVA | | | | GLEWVS | | ADSVKG | |
| | | SGFSLD | | | | | | | |
| 2F4 | 131 | EVQLVESGGGLV | 406 | DYGMT | 681 | WVRQAPGK | 956 | SINWSGTHTDY | 1231 |
| | | QPGGSLRLSCVA | | | | GLEWVS | | ADSVKG | |
| | | SGFSLD | | | | | | | |
| 2C3 | 132 | EVQLVESGGGLV | 407 | DYGMT | 682 | WVRQAPGK | 957 | SINWSGTHTDY | 1232 |
| | | QPGGSLRLSCVA | | | | GLEWVS | | ADSVKG | |
| | | SGFSLD | | | | | | | |
| 17E3 | 133 | EVQLVESGGGLV | 408 | RYTMG | 683 | WYRQAPGK | 958 | SIDSSGGTNYA | 1233 |
| | | QAGGSLRLSCVA | | | | QRDLVA | | DSVKG | |
| | | SKMTFM | | | | | | | |
| 17H3 | 134 | EVQLMESGGGLV | 409 | DYGMT | 684 | WVRQAPGK | 959 | SINWSGTHTDY | 1234 |
| | | QPGGSLRLSCVA | | | | GLEWVS | | ADSVKG | |
| | | SGFSLD | | | | | | | |
| 17D2 | 135 | EVQLVESGGGLV | 410 | DYGMT | 685 | WVRQAPGK | 960 | SINWSGTHTDY | 1235 |
| | | QPGGSLRLSCVA | | | | GLEWVS | | ADSVKG | |
| | | SGFSLD | | | | | | | |
| 2F1 | 136 | EVQLVESGGGLV | 411 | DYGMT | 686 | WVRQAPGK | 961 | SINWSGTHTDY | 1236 |
| | | QPGGSLRLSCVA | | | | ELEWIS | | ADSVKG | |
| | | SGFSLD | | | | | | | |
| 2E2 | 137 | EVQLVESGGGLV | 412 | DYGMT | 687 | WVRQAPGK | 962 | SINWSGTHTDY | 1237 |
| | | QPGGSLRLSCVA | | | | GLEWVS | | ADSVKG | |
| | | SGFSLD | | | | | | | |
| 2C2 | 138 | EVQLVESGGGLV | 413 | DYAMT | 688 | WVRQAPGK | 963 | SINWSGTHTDY | 1238 |
| | | QPGGSLRLSCVA | | | | GLEWVS | | ADSVKG | |
| | | SGFSLD | | | | | | | |
| 2E3 | 139 | EVQLVESGGGLV | 414 | DYGMT | 689 | WVRQAPGK | 964 | SINWSGTHTDY | 1239 |
| | | QPGGSLRLSCVA | | | | GLEWVS | | ADSVKG | |
| | | SGFSLD | | | | | | | |
| 13B10 | 140 | EVQLVESGGGLV | 415 | DYGMT | 690 | WVRQAPGK | 965 | SINWSGTHTDY | 1240 |
| | | QPGGSLRLSCVA | | | | GFEWVS | | ADSVKG | |
| | | SGFSLD | | | | | | | |
| 2D1 | 141 | EVQLVESGGGLV | 416 | DYGMT | 691 | WVRQAPGK | 966 | SINWSGTHTDY | 1241 |
| | | QPGGSLRLSCVA | | | | GLEWVS | | ADSVKG | |
| | | SGFSLD | | | | | | | |
| 2H3 | 142 | EVQLVESGGGLV | 417 | DYGMT | 692 | WVRQAPGK | 967 | SINWSGTHTDY | 1242 |
| | | QPGGSLRLSCVA | | | | GLEWVS | | ADSVKG | |
| | | SGFSLD | | | | | | | |
| 2H1 | 143 | EVQLVESGGGLV | 418 | DYGMT | 693 | WVRQAPGK | 968 | SINWSGTHTDY | 1243 |
| | | QPGGSLRLSCVA | | | | GLEWVS | | ADSVRG | |
| | | SGFSLD | | | | | | | |
| 2C1 | 144 | EVQLVESGGGLV | 419 | DYGMT | 694 | WVRQAPGK | 969 | SINWSGTHTDY | 1244 |
| | | QPGGSLRLSCVA | | | | GLEWVS | | TDSVKG | |
| | | SGFSLD | | | | | | | |
| 15C5 | 145 | EVQLVESGGGLV | 420 | DYGMT | 695 | WVRQAPGK | 970 | SINWNVTHTDY | 1245 |
| | | QPGGSLKLSCVA | | | | GLEWVS | | AYSVKG | |
| | | SGFSLD | | | | | | | |
| 2B3 | 146 | EVQLVESGGGLV | 421 | DYGMT | 696 | WVRQAPGK | 971 | SINWSGTHTDC | 1246 |
| | | QPGGSLRLSCVA | | | | GLEWVS | | ADSVKG | |
| | | SGFSLD | | | | | | | |
| 29H2 | 147 | EVQLVESGGGLV | 422 | DYGMT | 697 | WVRQAPGK | 972 | SINWSGTHTDY | 1247 |
| | | QPGGSLRLSCVA | | | | GLEWVS | | ADSVKG | |
| | | SGFSLD | | | | | | | |
| 17E4 | 148 | EVQLVESGGGLV | 423 | DYGMT | 698 | WVRQAPGK | 973 | SINWSGTHTDY | 1248 |
| | | QPGGSLRLSCVA | | | | GLEWVS | | ADSVKG | |
| | | SGFSLD | | | | | | | |
| 17A2 | 149 | EVQLVESGGGLV | 424 | DYAMT | 699 | WVRQAPGK | 974 | SINWSGTHTDY | 1249 |
| | | QPGGSLRLSCVA | | | | GLEWVS | | ADSVKG | |
| | | SGFSLD | | | | | | | |
| 15D1 | 150 | EVQLVESGGGLV | 425 | DYAMT | 700 | WVRQAPGK | 975 | SINWSGTHTDY | 1250 |
| | | QPGGSLRLSCVA | | | | GLEWVS | | ADSVKG | |
| | | SGFSLD | | | | | | | |
| 17B8 | 151 | EVQLVESGGGLV | 426 | DYGMT | 701 | WVRQAPGK | 976 | SINWSGTHTDY | 1251 |
| | | QPGGSLRLSCVA | | | | GLEWVS | | ADSVKG | |
| | | SGFSLD | | | | | | | |
| 15C11 | 152 | EVQLVESGGGLV | 427 | DYGMT | 702 | WVRQAPGK | 977 | SINWSGTHTDY | 1252 |
| | | QPGGSLRLSCVA | | | | GLEWVS | | ADSVKG | |
| | | SGFSLD | | | | | | | |
| 15G8 | 153 | EVQLVESGGGLV | 428 | DYGMT | 703 | WVRQAPGK | 978 | SINWNGTHTDY | 1253 |
| | | QPGGSLKLSCVA | | | | GLEWVS | | AYSVKG | |
| | | SGFSLD | | | | | | | |
| 17H14 | 154 | EVQLVESGGGLV | 429 | NYAMT | 704 | WVRQAPGK | 979 | SINWSGTHTDY | 1254 |
| | | QPGGSLRLSCVA | | | | GLEWVS | | ADSVKG | |
| | | SGFSLI | | | | | | | |
| 27G8 | 155 | EVQLVESGGGLV | 430 | DYGMT | 705 | WVRQAPGK | 980 | SINWSGTHTDY | 1255 |
| | | QPGGSLRLSCVA | | | | GLEWVS | | ADSVKG | |
| | | SGFSLD | | | | | | | |
| 38C6 | 156 | EVQLVESGGGLV | 431 | DYAMT | 706 | WVRQAPGK | 981 | SINWSGTHTDY | 1256 |
| | | QPGGSLRLSCVG | | | | GLEWVS | | ADSVKG | |
| | | SGFSLD | | | | | | | |
| 2A4 | 157 | EVQLVESGGGLV | 432 | DYAMS | 707 | WVRQAPGK | 982 | AINWSGSHRN | 1257 |
| | | QPGGSLRLSCAA | | | | GLEWVS | | YADSVKG | |
| | | SGFIFD | | | | | | | |
| 15G7 | 158 | EVQLVESGGGLV | 433 | DYAMS | 708 | WVRQAPGK | 983 | AINWSGTHRN | 1258 |
| | | QPGGSLRLSCAA | | | | GLEWVS | | YADSVKG | |
| | | SGFIFD | | | | | | | |
| 15B7 | 159 | EVQLVESGGGLV | 434 | DYAMS | 709 | WVRQAPGK | 984 | AINWSGSHRN | 1259 |
| | | QPGGSLKLSCAA | | | | GLEWVS | | YADSVKG | |
| | | SGFIFD | | | | | | | |
| 5G4 | 160 | EVQLVESGGGLV | 435 | DYAMS | 710 | WVRQAPGK | 985 | SINWSGSHRN | 1260 |
| | | QPGGSLTLSCAG | | | | GLEWVS | | YADSVKG | |
| | | SGFIFD | | | | | | | |
| 13B2 | 161 | EVQLVESGGSLV | 436 | DYAMS | 711 | WVRQAPGK | 986 | SINWSGTHKDY | 1261 |
| | | QPGGSLRLSCAA | | | | GLEWIS | | ADSVKG | |
| | | SGFTFD | | | | | | | |
| 2E5 | 162 | EVQLVESGGSLV | 437 | DYAMS | 712 | WVRQAPGK | 987 | SINWSGTHTDY | 1262 |
| | | QPGESLRLSCAA | | | | GLEWIS | | ADSVKG | |
| | | SGFTFD | | | | | | | |
| 15G1 | 163 | EVQLVESGGSLV | 438 | DYAMS | 713 | WVRQAPGK | 988 | SINWSGTHTDY | 1263 |
| | | PPGGSLRLSCAA | | | | GLEWVS | | TDSVKG | |
| | | SGFTFD | | | | | | | |
| 27B1 | 164 | EVQLVESGGSLV | 439 | DYAMS | 714 | WVRQAPGK | 989 | SINWSGTHTDY | 1264 |
| | | QPGGSLRLSCAA | | | | GLEWIS | | ADSVKG | |
| | | SGFTFD | | | | | | | |
| 17E7 | 165 | EVQLVESGGSLV | 440 | DYAMS | 715 | WVRQVPGK | 990 | SINWSGTHTDY | 1265 |
| | | QPGGSLRLSCAA | | | | GLEWVS | | ADSVKG | |
| | | SGFTFD | | | | | | | |
| 17D8 | 166 | EVQLVESGGSLV | 441 | DYAMS | 716 | WVRQAPGK | 991 | SINWSGTHTDY | 1266 |
| | | PPGGSLRLSCAV | | | | GLEWVS | | TDSVKG | |
| | | SGFTFD | | | | | | | |
| 5F8 | 167 | EVQLVESGGSLV | 442 | DYALS | 717 | WVRQAPGK | 992 | SINWSGTHTDY | 1267 |
| | | QPGGSLRLSCAA | | | | GLEWIS | | ADSVKG | |
| | | SGFTFD | | | | | | | |
| 2D4 | 168 | EVQLVESGGSLV | 443 | DYAMT | 718 | WVRQAPGK | 993 | SINWSGTHTDY | 1268 |
| | | QPGGSLRLSCAA | | | | GLEWVS | | ADSVKG | |
| | | SGFTFD | | | | | | | |
| 13D8 | 169 | EVQLVESGGSLV | 444 | DYAMT | 719 | WVRQASGK | 994 | SINWSGTHTDY | 1269 |
| | | QPGGSLRLSCAA | | | | GLEWVS | | TDSVKG | |
| | | SGFTFD | | | | | | | |
| 17G8 | 170 | EVQLVESGGSLV | 445 | DYAMS | 720 | WVRQAPGK | 995 | SINWSGTHTGY | 1270 |
| | | PPGGSLRLSCAA | | | | GLEWVS | | TDSVKG | |
| | | SGFTFD | | | | | | | |
| 2H4 | 171 | EVQLVESGGSLV | 446 | DYAMT | 721 | WVRQAPGK | 996 | SINWSGTHTDY | 1271 |
| | | QPGGSLRLSCAA | | | | GLEWVS | | TDSVKG | |
| | | SGFTFD | | | | | | | |
| 2F3 | 172 | EVQLVESGGSLV | 447 | DYAMT | 722 | WVRQAPGK | 997 | SINWSGTHTDY | 1272 |
| | | QPGGSLRLSCAA | | | | GLEWVS | | TGSVKG | |
| | | SGFTFD | | | | | | | |
| 2F5 | 173 | EVQLVESGGSLV | 448 | DYAMS | 723 | WVRQAPGK | 998 | SINWSGTHTDY | 1273 |
| | | PPGGSLRLSCAA | | | | GLEWVS | | TDSVKG | |
| | | SGFTFD | | | | | | | |
| 30E10 | 174 | KVQLVESGGSLV | 449 | DYAMT | 724 | WVRQAPGK | 999 | SINWSGTHTDY | 1274 |
| | | PPGGSLRLSCAA | | | | GLEWVS | | TDSVKG | |
| | | SGFTFD | | | | | | | |
| 29H1 | 175 | EVQLVESGGSLV | 450 | DYAMS | 725 | WVRQAPGK | 1000 | SINWSGTHTGY | 1275 |
| | | PPGGSLRLSCAA | | | | GLEWVS | | TDSVKG | |
| | | SGFTFD | | | | | | | |
| 17E2 | 176 | EVQLVESGGSLV | 451 | DYGMS | 726 | WVRQAPGK | 1001 | SINWSGTHTDY | 1276 |
| | | PPGGSLRLSCAA | | | | GLEWVS | | TDSVKG | |
| | | SGFTFD | | | | | | | |
| 2B1 | 177 | EVQLVESGGSLV | 452 | DYAMT | 727 | WVRQAPGK | 1002 | SINWSGTHTDY | 1277 |
| | | QPGGSLRLSCAA | | | | GLEWVS | | TDSVKG | |
| | | SGFTFD | | | | | | | |
| 2A5 | 178 | EVQLVESGGGLV | 453 | DYAMT | 728 | WVRQAPGK | 1003 | SINWSGTHTDY | 1278 |
| | | QPGGSLRLSCAT | | | | GLEWVS | | TDSVKG | |
| | | SGFTFD | | | | | | | |
| 13C12 | 179 | EVQLVESGGSLV | 454 | DYAMT | 729 | WVRQAPGK | 1004 | SINWSGTHTDY | 1279 |
| | | QPGGSLRLSCAT | | | | GLEWVS | | TDSVKG | |
| | | SGFTFD | | | | | | | |
| 17E10 | 180 | EVQLVESGGSLV | 455 | DYAMT | 730 | WVRQAPGK | 1005 | SINWSGTHTDC | 1280 |
| | | QPGGSLRLSCAA | | | | GLEWVS | | TDSVKG | |
| | | SGFTFD | | | | | | | |
| 27D4 | 181 | EVQLVESGGSLV | 456 | DYAMT | 731 | WVRQASGK | 1006 | SINWSGTHTDY | 1281 |
| | | QPGGSLRLSCAA | | | | GLEWVS | | ADSVKG | |
| | | SGFTFD | | | | | | | |
| 15F9 | 182 | EVQLVESGGSLV | 457 | DYAMT | 732 | WVRQAPGK | 1007 | SINWSGTHTDY | 1282 |
| | | QPGGSLRLSCAA | | | | GLEWVS | | TGSVKG | |
| | | SGFTFD | | | | | | | |
| 30H9 | 183 | EVQLVESGGSLV | 458 | DYAMT | 733 | WVRQAPGK | 1008 | SINWSGTHTDY | 1283 |
| | | QPGGSLRLSCAA | | | | GLEWVS | | TDSVKG | |
| | | SGFTFD | | | | | | | |
| 39C1 | 184 | EVQLVESGGSLV | 459 | DYGMS | 734 | WVRQAPGK | 1009 | SINWSGTHTDY | 1284 |
| | | PPGGSLRLSCAA | | | | GLEWVS | | TDSVKG | |
| | | SGFTFD | | | | | | | |
| 27G2 | 185 | EVQLVESGGSLV | 460 | DYAMT | 735 | WVRQTPGK | 1010 | SINWSGTHTDY | 1285 |
| | | QPGGSLRLSCAA | | | | GLEWVS | | TDSVKG | |
| | | SGFTFD | | | | | | | |
| 2D3 | 186 | EVQLVESGGSLV | 461 | DYAMS | 736 | WVRQVPGK | 1011 | SINWSGTHTDY | 1286 |
| | | QPGGSLRLSCAA | | | | GLEWVS | | ADSVKG | |
| | | SGFTFD | | | | | | | |
| 5F7 | 187 | EVQLVESGGGLV | 462 | INTMG | 737 | WYRQAPGK | 1012 | LISSIGDTYYAD | 1287 |
| | | QAGGSLRLSCAA | | | | QRELVA | | SVKG | |
| | | SGITFS | | | | | | | |
| 118N121_A1_4_OK/ | 188 | EVQLVESGGGFV | 463 | EYAAA | 738 | WFRQSPGK | 1013 | GIMWDGRSLF | 1288 |
| 1-127 | | QTGGSPRLSCAA | | | | ERDLVA | | YADSVKG | |
| | | SGRSFS | | | | | | | |
| 47D5 | 189 | KVQLVESGGGLV | 464 | FNDMA | 739 | WYRQAPGK | 1014 | LISRVGVTSSA | 1289 |
| | | QPGGSLRLSCAA | | | | QRELVA | | DSVKG | |
| | | SGSIFG | | | | | | | |
| 14B11 | 190 | EVQLVESGGGLV | 465 | SYGMG | 740 | WFRQVPGK | 1015 | TINWSGVTAYA | 1290 |
| | | QAGGSLRLSCAA | | | | EREFVA | | DSVKG | |
| | | SGSTFS | | | | | | | |
| 14B10 | 191 | EVQLVESGGGLV | 466 | SYGMG | 741 | WFRQAPGK | 1016 | TINWSGVTAYA | 1291 |
| | | QAGGSLRLSCAV | | | | EREFVA | | DSIKG | |
| | | NSRTFS | | | | | | | |
| 14B4 | 192 | EVQLVESGGGLV | 467 | SYGMG | 742 | WFRQAPGK | 1017 | TINWSGVTAYA | 1292 |
| | | QAGGSLRLSCAV | | | | DREFVA | | DSIKG | |
| | | SSRAFS | | | | | | | |
| 14C11 | 193 | EVQLVESGGGLV | 468 | SYGMG | 743 | WFRQAPGK | 1018 | TINWSGATAYA | 1293 |
| | | QAGGSLRLSCAV | | | | EREFVA | | DSIKG | |
| | | NSRTFS | | | | | | | |
| 14B5 | 194 | EVQLVESGGGLV | 469 | SYGMG | 744 | WFRQAPGK | 1019 | TINWSGVTAYA | 1294 |
| | | QAGGSLRLSCAV | | | | DREFVA | | DSIKG | |
| | | SSRAFS | | | | | | | |
| 14C6 | 195 | EVQLVESGGGSV | 470 | SYGMG | 745 | WFRQAPGK | 1020 | TINWSGVTAYA | 1295 |
| | | QAGGSLRLSCVA | | | | ERAFVA | | DSVKG | |
| | | SEGTFS | | | | | | | |
| 14A4 | 196 | EVQLVESGGGSV | 471 | SYGMG | 746 | WFRQAPGK | 1021 | TINWSGVNAYA | 1296 |
| | | QAGSSLTLSCVAS | | | | ERAFVA | | DSVKG | |
| | | EGTFS | | | | | | | |
| 14B3 | 197 | EVQLVESGGGLV | 472 | SYGMG | 747 | WFRQAPGK | 1022 | TINWSGVNAYA | 1297 |
| | | QPGGSLTLSCVA | | | | ERAFVA | | DSVKG | |
| | | SEGTFS | | | | | | | |
| 14C1 | 198 | EVQLVESGGGSV | 473 | SYGMG | 748 | WFRQAPGK | 1023 | TINWSGVTAYA | 1298 |
| | | QAGGSLRLSCAA | | | | ERAFVA | | DSVKG | |
| | | SGSTFS | | | | | | | |
| 14A12 | 199 | EVQLVKSGGGLV | 474 | SYGMG | 749 | WFRQAPGK | 1024 | TINWSGVTAYA | 1299 |
| | | QAGGSLRLSCAA | | | | EREFVA | | DSVKG | |
| | | SERTFS | | | | | | | |
| 14A2 | 200 | EVQLVESGGGLV | 475 | SYGMG | 750 | WFRQAPGK | 1025 | TINWSGVTAYA | 1300 |
| | | QAGGSLRLSCAA | | | | EREFVA | | DSVKG | |
| | | SERTFS | | | | | | | |
| 14A1 | 201 | EVQLVESGGGSV | 476 | SYGMG | 751 | WFRQAPGK | 1026 | TINWSGVTAYA | 1301 |
| | | QAGGSLRLSCAA | | | | EREFVA | | DSVKG | |
| | | SERTFS | | | | | | | |
| 17C3 | 202 | EVQLVESGGGLV | 477 | RYDMG | 752 | WYRQAPGQ | 1027 | AISGAGDINYA | 1302 |
| | | QAGGSLRLSCAA | | | | QREWVA | | DSVKG | |
| | | NGLTFR | | | | | | | |
| 46D3 | 203 | KVQLVESGGGLV | 478 | EYSMG | 753 | WFRQAPGK | 1028 | TISWNYGYTYY | 1303 |
| | | QAGGSLRLSCAA | | | | EREFVA | | SDSVKG | |
| | | SGRTFT | | | | | | | |
| 27H5 | 204 | EVQLVESGGGLV | 479 | DYGIG | 754 | WFRQASGK | 1029 | CITSSDGSTYY | 1304 |
| | | QAGGSLRLSCAA | | | | EREGVS | | ADSVKG | |
| | | SGFTFD | | | | | | | |
| 17C2 | 205 | EVQLVESGGGLV | 480 | SYAMS | 755 | WVRQAPGK | 1030 | AVDSGGGRTD | 1305 |
| | | QPGGSLRLSCAA | | | | GLEWVS | | YAHSVKG | |
| | | SGFAFS | | | | | | | |
| 17D11 | 206 | EVQLVESGGGLV | 481 | TSAMG | 756 | WFRQAPGK | 1031 | TISRGGSATYY | 1306 |
| | | QAGGSLRLSCTA | | | | EREFVA | | ADSLKG | |
| | | SGRTSS | | | | | | | |
| 15A6 | 207 | EVQLVESGGGLV | 482 | TRTMA | 757 | WYRQAPGK | 1032 | TISSHGLPVYA | 1307 |
| | | QAGGSLRLSCVT | | | | QRDWVA | | DSVKG | |
| | | SRRPAS | | | | | | | |
| 17B6 | 208 | EVQLVESGGGLV | 483 | TRTMA | 758 | WYRQAPGK | 1033 | TIGTSGPPRYA | 1308 |
| | | QPGGSLRLSCAA | | | | QRDWVA | | DSVKG | |
| | | SRIPFS | | | | | | | |
| 17C5 | 209 | EVQLVESGGGLV | 484 | TRTMA | 759 | WYRQAPGK | 1034 | TISSHGLPVYA | 1309 |
| | | QAGGSLRLSCVT | | | | QRDWVA | | DSVKG | |
| | | SRRPAS | | | | | | | |
| 15E11 | 210 | EVQLVESGGGLV | 485 | SRTMA | 760 | WYRQAPGK | 1035 | TISARGMPAYE | 1310 |
| | | QAGGSLRLSCVA | | | | QRDWVA | | DSVKG | |
| | | SRIPFS | | | | | | | |
| 15C2 | 211 | EVQLVESGGGLV | 486 | TRTMA | 761 | WYRQAQGK | 1036 | TISSHGLPVYA | 1311 |
| | | QAGGSLRLSCVT | | | | QRDWVA | | DSVKG | |
| | | SRRPAS | | | | | | | |
| 2A3 | 212 | EVQLVESGGGLV | 487 | TRTMA | 762 | WYRQAPGK | 1037 | TIRNGAPVYAD | 1312 |
| | | QAGGSLNLSCVA | | | | PRDWVA | | SVKG | |
| | | SGIPFS | | | | | | | |
| 27A5 | 213 | EVQLVESGGGLV | 488 | TRTMA | 763 | WYRQPPGN | 1038 | TIRSGAPVYAD | 1313 |
| | | QAGGSLNLSCVA | | | | ERDWVA | | SVKG | |
| | | SGIPFS | | | | | | | |
| 2C5 | 214 | EVQLVESGGGLV | 489 | TRTMA | 764 | WYRQTPGK | 1039 | TIRSGTPVYAD | 1314 |
| | | QAGGSLNLSCVA | | | | SRDWVA | | SVKG | |
| | | SGIPFS | | | | | | | |
| 27G5 | 215 | EVQLVESGGGLV | 490 | IRTMA | 765 | WYRQTPGN | 1040 | TIGSSGTPAYA | 1315 |
| | | QPGGSLRLSCVA | | | | QRDWLA | | DSVKG | |
| | | SRIPAS | | | | | | | |
| 13A9 | 216 | EVQLVESGGGLV | 491 | IRTMA | 766 | WYRQAPGK | 1041 | TIGTGGTPAYA | 1316 |
| | | QAGGSLRLSCVA | | | | QRDWVA | | DSFKG | |
| | | SRIPAS | | | | | | | |
| 29E9 | 217 | EVQLVESGGGLV | 492 | IRTMA | 767 | WYRQTPGN | 1042 | TIGSSGTPAYA | 1317 |
| | | QPGGSLRLSCVA | | | | QRDWLA | | DSVKG | |
| | | SRIPAS | | | | | | | |
| 15D8 | 218 | EVQLVESGGGLV | 493 | IRTMA | 768 | WYRQTPGN | 1043 | TIGSSGTPAYA | 1318 |
| | | QPGGSLKLSCVA | | | | QRDWLA | | DSVKG | |
| | | STIPAS | | | | | | | |
| 15G4 | 219 | EVQLVESGGGLV | 494 | SRTMA | 769 | WYRQAPGK | 1044 | TIGTHGTPLYA | 1319 |
| | | QAGGSLRLSCVA | | | | TRDWVA | | DSVKG | |
| | | SGIPFR | | | | | | | |
| 15D12 | 220 | EVQLVESGGGLV | 495 | RYVMG | 770 | WYRQGPGK | 1045 | TVNDGGTTSY | 1320 |
| | | QAGESLRLSCATS | | | | QRELVA | | ADSVKG | |
| | | GITFK | | | | | | | |
| 15E12 | 221 | EVQLMESGGGLV | 496 | RYDMG | 771 | WYRQAPGQ | 1046 | AISGAGDINYA | 1321 |
| | | QAGGSLRLSCAA | | | | QREWVA | | DSVKG | |
| | | NGLTFR | | | | | | | |
| 13D7 | 222 | EVQLVESGGGLV | 497 | RYDMG | 772 | WYRQAPGQ | 1047 | AISGAGDINYA | 1322 |
| | | QAGGSLRLSCAA | | | | QREWVA | | DSVKG | |
| | | NGLTFR | | | | | | | |
| 13A8 | 223 | EVQLVESGGGLV | 498 | FSRRTMA | 773 | WYRQAPGK | 1048 | TIAGDGSTVYA | 1323 |
| | | QPGGSLRLSCAA | | | | QRDWVA | | DSMKG | |
| | | SGLGIA | | | | | | | |
| 15A4 | 224 | EVQLVESGGGLV | 499 | FSRRTMA | 774 | WYRQAPGK | 1049 | TIAGDGSTVYA | 1324 |
| | | QPGGSLRLSCAA | | | | QRDWVA | | DSMKG | |
| | | SGLGIA | | | | | | | |
| 17F7 | 225 | EVQLVESGGGLV | 500 | IRVMA | 775 | WYRQPPGK | 1050 | TISSDGTANYA | 1325 |
| | | QAGGSLRLSCVA | | | | QRDWVG | | DSVKG | |
| | | SGIAQS | | | | | | | |
| 15C8 | 226 | EVQLVESGGGLV | 501 | IRTMA | 776 | WYRQAPGK | 1051 | TSDSGGTTLYA | 1326 |
| | | QAGGSLRLSCAA | | | | QRDWVA | | DSVKG | |
| | | SGIAFR | | | | | | | |
| 17A10 | 227 | EVQLVESGGGLV | 502 | RAIA | 777 | WYRQAPGK | 1052 | TSGTGYGATY | 1327 |
| | | QAGGSLRLSCVA | | | | QRDWVA | | DDSVKG | |
| | | SGIPSI | | | | | | | |
| 27D3 | 228 | EVQLMESGGGLV | 503 | FSRRTMA | 778 | WYRQAPGK | 1053 | TIAGDGSTVYA | 1328 |
| | | QPGGSLRLSCAA | | | | QRDWVA | | DSMKG | |
| | | SGLGIA | | | | | | | |
| 13B12 | 229 | EVQLVESGGGLV | 504 | IRTMA | 779 | WYRQAPGK | 1054 | TIGSDGTTJYAD | 1329 |
| | | QAGGSLRLSCAA | | | | QRDWVA | | SVKG | |
| | | SGIAFR | | | | | | | |
| 15B2 | 230 | EVQLVESGGGLV | 505 | IRAMA | 780 | WYRQAPGR | 1055 | TIYSPSGSAVY | 1330 |
| | | QAGGSLRLSCVV | | | | QRDWVA | | ADSVKG | |
| | | SGIPSS | | | | | | | |
| 15B11 | 231 | EVQLVESGGGSV | 506 | IRAMA | 781 | WYRQAPGR | 1056 | TIYSRSGGAVY | 1331 |
| | | QAGGSLRLSCVV | | | | QRDWVA | | ADSVKG | |
| | | SGIPSS | | | | | | | |
| 13C9 | 232 | EVQLVESGGGLV | 507 | HAMA | 782 | WYRQAPGK | 1057 | TTYSRGGTTYN | 1332 |
| | | QAGGSLRLSCVA | | | | QRDWGA | | DSAKG | |
| | | SGIPSI | | | | | | | |
| 17D5 | 233 | EVQLVESGGGLV | 508 | IRTMA | 783 | WYRQAPGK | 1058 | SIGTRGAPVYA | 1333 |
| | | QPGGSLRLSCAA | | | | QRDWVA | | DSVNG | |
| | | SGIIGT | | | | | | | |
| 27B5 | 234 | EVQLVESGGGLV | 509 | IRTMA | 784 | WYRQAPGK | 1059 | TSDSGGTTLYA | 1334 |
| | | QAGGSLRLPCAA | | | | QRDWVA | | DSVKG | |
| | | SGIAFR | | | | | | | |
| 27C7 | 235 | EVQLVESGGGLV | 510 | IRTMA | 785 | WYRQAPGK | 1060 | TSDSGGTTLYA | 1335 |
| | | QAGGSLRLSCAA | | | | QRDWVA | | DSVKG | |
| | | SGIAFR | | | | | | | |
| 13D4 | 236 | EVQLVESGGGLV | 511 | IRAMA | 786 | WYRQAPGR | 1061 | TIYSPSGSAVY | 1336 |
| | | QAGGSLRLSCVV | | | | QRDWVA | | ADSVKG | |
| | | SGIPSS | | | | | | | |
| 15G5 | 237 | EVQLVESGGGLV | 512 | IRAMA | 787 | WYRQAPGR | 1062 | TIYSPSGSAVY | 1337 |
| | | QAGGSLRLSCVV | | | | QRDWVA | | ADSVKG | |
| | | SGIPST | | | | | | | |
| 13C4 | 238 | EVQLVESGGGLV | 513 | IRAMA | 788 | WYRQAPGR | 1063 | TIYSPSGSAVY | 1338 |
| | | QAGGSLRLSCVV | | | | QRDWVA | | ADSVKG | |
| | | SGIPSS | | | | | | | |
| 46G1 | 239 | EVQLVESGGGLV | 514 | DDAMG | 789 | WFRQAPGK | 1064 | SLYLNGDYPYY | 1339 |
| | | QAGGSLRLSCAA | | | | ERECVA | | ADSVKG | |
| | | SGRTFS | | | | | | | |
| 46E4 | 240 | EVQLVESGGGLV | 515 | DDAVG | 790 | WFRQAPGK | 1065 | SMYLDGDYPY | 1340 |
| | | QAGGSLRLSCAA | | | | ERECVA | | YADSVKG | |
| | | SGRAFK | | | | | | | |
| 17B5 | 241 | EVQLVESGGGLV | 516 | TDMMG | 791 | WYRQAPGK | 1066 | SITKFGSTNYA | 1341 |
| | | QTGGSLRLSCAA | | | | QREFVA | | DSVKG | |
| | | SGSTFR | | | | | | | |
| 15C9 | 242 | EVQLVESGGGLV | 517 | LRAMA | 792 | WYRQAPGR | 1067 | TSSNTGGTTYD | 1342 |
| | | QAGGSLKLSCVN | | | | QRDWVA | | DSVKG | |
| | | SGIPST | | | | | | | |
| 13D10 | 243 | EVQLVESGGGLV | 518 | DSNAIG | 793 | WFRQAPGK | 1068 | CIASSDGSTYY | 1343 |
| | | QPGGSLRLSCAA | | | | EREEVS | | AESVKG | |
| | | SSVITL | | | | | | | |
| 17C6 | 244 | EVQLVESGGGLV | 519 | LDIMA | 794 | WYRQAPEK | 1069 | SVSGGGNSDY | 1344 |
| | | QAGGSLTLSCAA | | | | QRELVA | | ASSVKG | |
| | | SGSTSS | | | | | | | |
| 15A2 | 245 | EVQLVESGGGLA | 520 | TRVMA | 795 | WYRQTPGK | 1070 | SMRGSGSTNY | 1345 |
| | | QAGGSLSLSCAA | | | | QREFVA | | ADSARG | |
| | | SGRFFS | | | | | | | |
| 17A8 | 246 | EVQLVESGGGLV | 521 | TRVMA | 796 | WYRQTPGK | 1071 | SMRGSGSTNY | 1346 |
| | | QAGGSLSLSCAA | | | | QREFVA | | ADSVRG | |
| | | SGRFFS | | | | | | | |
| 15G10 | 247 | EVQLVESGGGLV | 522 | TRVMA | 797 | WYRQTPGK | 1072 | SMRGSGSTNY | 1347 |
| | | QAGGSLSLSCAA | | | | QREFVA | | ADSARG | |
| | | SGRFFS | | | | | | | |
| 27A3 | 248 | EVQLVESGGGLV | 523 | TRVMA | 796 | WYRQTPGK | 1073 | SMRGSGSTNY | 1348 |
| | | QAGGSLSLSCVA | | | | QREFVA | | ADSVRG | |
| | | SGRFFS | | | | | | | |
| 17H10 | 249 | EVQLVESGGGLV | 524 | TRVMA | 799 | WYRQTPGN | 1074 | TIHSSGSTIYAD | 1349 |
| | | QAGGSLSLSCSA | | | | QREFVA | | SVRG | |
| | | SGRFFS | | | | | | | |
| 30D10 | 250 | EVQLVESGGGLV | 525 | IRTMA | 800 | WYRQPPGN | 1075 | TIGSNGFATYP | 1350 |
| | | QAGGSLTLSCTAS | | | | QREWVA | | DSVKG | |
| | | ETTVR | | | | | | | |
| 15H4 | 251 | EVQLVESGGGLV | 526 | FNTVA | 801 | WYRQAPGE | 1076 | TISRQGMSTYP | 1351 |
| | | QAGGSLTLSCAP | | | | QREWVA | | DSVKG | |
| | | SESTVS | | | | | | | |
| 17B7 | 252 | EVQLVESGGGLV | 527 | FRTMA | 802 | WYRQAPGK | 1077 | TIGSDGLANYA | 1352 |
| | | QAGGSLRLSCAA | | | | QREWVA | | DSVKG | |
| | | SGIISS | | | | | | | |
| 15D2 | 253 | EVQLVESGGGLV | 528 | IRAMA | 803 | WYRQAPGK | 1078 | TIGSSGHPVYT | 1353 |
| | | QAGGSLRLSCVV | | | | QRDWVA | | DSVKG | |
| | | SGVFGP | | | | | | | |
| 17G5 | 254 | EVQLVESGGGLV | 529 | FSSRTMA | 804 | WYRQAPGK | 1079 | TIGSGGTTNYA | 1354 |
| | | QPGGSLRLSCAA | | | | QRDWVA | | DSVKG | |
| | | SGIGIA | | | | | | | |
| 15B6 | 255 | EVQLVESGGGLV | 530 | FRTMA | 805 | WYRQAPGN | 1080 | TIGSAGLASYA | 1355 |
| | | QPGGSLRLSCAA | | | | QRDWVA | | DSVRG | |
| | | SGIIGS | | | | | | | |
| 27F2 | 256 | EVQLVESGGGLV | 531 | FRTLA | 806 | WYRQAPGK | 1081 | TISSAGGTAYA | 1356 |
| | | QAGGSLRLSCAA | | | | QRDWVA | | DAVKG | |
| | | SGIISS | | | | | | | |
| 17F5 | 257 | EVQLVESGGGLV | 532 | FSRRTMA | 807 | WYRQAPGK | 1082 | TIAGDGSTVYA | 1357 |
| | | QPGGSLRLSCAA | | | | QRDWVA | | DSMKG | |
| | | SGLGIA | | | | | | | |
| 17B2 | 258 | EVQLVESGGGLV | 533 | NYAMT | 808 | WVRQAPGK | 1083 | GVGGDGVGSY | 1358 |
| | | QPGGSLRLSCAG | | | | GLEWVS | | ADSVKG | |
| | | SGFTFS | | | | | | | |
| 27H4 | 259 | EVQLVESGGGLV | 534 | RYTMG | 809 | WYRQAPGK | 1084 | SIDASGGTNYA | 1359 |
| | | QAGGSLRLSCVA | | | | QRDLVA | | DSVKG | |
| | | SKMTFM | | | | | | | |
| 13A4 | 260 | EVQLVESGGGLV | 535 | RYTMG | 810 | WYRQAPGK | 1085 | SIDSSGGTNYA | 1360 |
| | | QAGGSLRLSCVA | | | | QRDLVA | | DSVKG | |
| | | SKMTFM | | | | | | | |
| 2A1 | 261 | EVQLVESGGGLV | 536 | RYIMD | 811 | WYRQAPGK | 1086 | SINSDGSTGYT | 1361 |
| | | QAGGSLRLSCVA | | | | QRELVA | | DSVKG | |
| | | SKITFR | | | | | | | |
| 15E10 | 262 | EVQLVESGGGLV | 537 | RYTMG | 812 | WYRQAPGK | 1087 | EISSADEPSFA | 1362 |
| | | QAGGSLKLSCVA | | | | ERELVA | | DAVKG | |
| | | SGITFF | | | | | | | |
| 27E7 | 263 | EVQLVESGGGLV | 538 | RYDMG | 813 | WYRQFPGK | 1088 | TILSEGDTNYV | 1363 |
| | | QAGGSLRLSCAA | | | | ERELVA | | DPVKG | |
| | | SGITFR | | | | | | | |
| 47E5 | 264 | EVQLVESGGGLV | 539 | FDSMG | 814 | WYRQAPGN | 1089 | IISNGGTTSYR | 1364 |
| | | QAGGSLRLSCAA | | | | ERILVA | | DSVKG | |
| | | SASIFG | | | | | | | |
| 2G4 | 265 | EVQLVESGGGLV | 540 | HNAMG | 815 | WYRQAPGK | 1090 | YITINGIANYVD | 1365 |
| | | QAGGSLRLSCAA | | | | QRELVT | | SVKG | |
| | | SGNIFS | | | | | | | |
| 14D4 | 266 | EVQLVESGGGLV | 541 | TYVMG | 816 | WFRQAPGD | 1091 | HIFRSGITSYAS | 1366 |
| | | QAGDSLRLSCAA | | | | GREFVA | | SVKG | |
| | | SGRALD | | | | | | | |
| 17A5 | 267 | EVQLVESGGGLV | 542 | DYSMS | 817 | WVRQATGK | 1092 | GISWNGGSTN | 1367 |
| | | QPGGSLRLSCAA | | | | GLEWVS | | YADSVKG | |
| | | SGFTFD | | | | | | | |
| 15D10 | 268 | EVQLVESGGGLV | 543 | SYRMY | 818 | WVRQAPGK | 1093 | AIKPDGSITYYA | 1368 |
| | | QPGGSLKLSCAA | | | | GLEWVS | | DSVKG | |
| | | SGFTFS | | | | | | | |
| 13C2 | 269 | EVQLVESGGGLV | 544 | INRMA | 819 | WYRQSPGK | 1094 | AVDNDDNTEY | 1369 |
| | | QAGGSLRLSCAA | | | | QRELVA | | SDSVAG | |
| | | SGSTFS | | | | | | | |
| 17G11 | 270 | EVQLVESGGGLV | 545 | INRWG | 820 | WYRQAPGK | 1095 | AIDDGGNTEYS | 1370 |
| | | QAGGSLRLSCAA | | | | QRELVA | | DFVNG | |
| | | SGSTFS | | | | | | | |
| 17A3 | 271 | EVQLVESGGGLV | 546 | FDNN | 821 | WYRQAPGK | 1096 | TIAHDGSTNYA | 1371 |
| | | QAGGSLSLSCAA | | | | QRELVA | | NSVKG | |
| | | SATLHR | | | | | | | |
| 27B7 | 272 | EVQLVESGGGLV | 547 | SYAMS | 822 | WVRQAPGK | 1097 | AISSGGGSITTY | 1372 |
| | | QPGGSLRLSCAA | | | | GLEWVS | | ADSVKG | |
| | | SGFTFS | | | | | | | |
| 17A6 | 273 | EVQLVESGGGLV | 548 | SYAMS | 823 | WVRQAPGK | 1098 | AISSGGGSITTY | 1373 |
| | | QPGGSLRLSCAA | | | | GLEWVS | | ADSVKG | |
| | | SGFTFS | | | | | | | |
| 17D7 | 274 | EVQLVESGGGLV | 549 | YCAIG | 824 | WFRQAPGK | 1099 | CISSSDGSTYY | 1374 |
| | | QPGGSLRLSCAA | | | | EREGVS | | ADSVKG | |
| | | SGFTLD | | | | | | | |
| 46D4 | 275 | EVQLVESGGGLV | 550 | DYAMS | 825 | WVRQAPGK | 1100 | SINWSGTHTDY | 1375 |
| | | QPGGSLRLSCAA | | | | GLEWVS | | AEDMKG | |
| | | SGFIFD | | | | | | | |
| 27B3 | 276 | EVQLVESGGGLV | 551 | IRTMA | 826 | WYRQPPGN | 1101 | TIGSNGFATYP | 1376 |
| | | QAGGSLTLSCTAS | | | | QREWVA | | DSVKG | |
| | | ETTVR | | | | | | | |
| 27E5 | 277 | EVQLVESGGGLV | 552 | IRTMA | 827 | WYRQPPGN | 1102 | TIGSNGFATYP | 1377 |
| | | QAGGSLTLSCTAS | | | | QREWVA | | DSVKG | |
| | | ETTVR | | | | | | | |
| 27D6 | 278 | EVQLVESGGGLV | 553 | IRTMA | 828 | WYRQPPGN | 1103 | TIGSNGFATYP | 1378 |
| | | QAGGSLTLSCTAS | | | | QREWVA | | DSVKG | |
| | | ETTVR | | | | | | | |
| 30D10 | 279 | EVQLVESGGGLV | 554 | IRTMA | 829 | WYRQPPGN | 1104 | TIGSNGFATYP | 1379 |
| | | QAGGSLTLSCTAS | | | | QREWVA | | DSVKG | |
| | | ETTVR | | | | | | | |
| 47G11 | 280 | EVQLVESGGGLV | 555 | PMG | 830 | WFRQAPGK | 1105 | AIGSGDIITYYA | 1380 |
| | | QPGGSLRLSCAA | | | | EREFVA | | DSVKG | |
| | | SGRIFY | | | | | | | |
| 27C3 | 281 | EVQLVESGGGLV | 556 | DYATS | 831 | WVRQAPGK | 1106 | AINSGGGSTYY | 1381 |
| | | QPGGSLRLSCAA | | | | GLEWVS | | ADSVKG | |
| | | SGFTFD | | | | | | | |
| 11A101/1- | 282 | EVQLVESGGGLV | 557 | AMG | 832 | WFRQAPGK | 1107 | AISRSPGVTYY | 1382 |
| 120 | | QAGGSLRLSCAA | | | | EREFVA | | ADSVKG | |
| | | SGRTFN | | | | | | | |
| 11A22/1- | 283 | EVQLVESGGGLV | 558 | SYAMA | 833 | WFRQAPGT | 1108 | GIRWSDGSTY | 1383 |
| 122 | | QAGGSLRLSCAA | | | | EREFIA | | YADSVKG | |
| | | SGRTFS | | | | | | | |
| 12D44/1- | 284 | KVQLVESGGGLV | 559 | SYAMA | 834 | WFRQAPGT | 1109 | GIRWSDGSTY | 1384 |
| 122 | | QAGGSLRLSCAA | | | | EREFIA | | YADSVKG | |
| | | SGRTFS | | | | | | | |
| 12E11/1- | 285 | EVQLVESGGGLV | 560 | SYAMA | 835 | WFRQAPGK | 1110 | GIRWSDGSTY | 1385 |
| 122 | | QAGGSLRLSCAA | | | | EREFVG | | YADSVKG | |
| | | SGRTFS | | | | | | | |
| 13G111/ | 286 | EVQLVESGGGLV | 561 | SYAMG | 836 | WFRQAPGK | 1111 | AIRWSGGNTY | 1386 |
| 1-123 | | QAGGSLRLSCAA | | | | ERAFVA | | YADSVKG | |
| | | SGRTFS | | | | | | | |
| 13F71/1- | 287 | EVQLVESGGGLV | 562 | NYALA | 837 | WFRQAPGK | 1112 | AINWRSGGST | 1387 |
| 123 | | QAGGSLRLSCVA | | | | EREFVA | | YYADSVKG | |
| | | SGRTFS | | | | | | | |
| 14H61/1- | 288 | EVQLVESGGGLV | 563 | RFAMG | 838 | WFRQAPGK | 1113 | AVRWSDDYTY | 1388 |
| 122 | | QAGGSLRLSCAA | | | | EREFVA | | YADSVKG | |
| | | SGRTFS | | | | | | | |
| 22B12/1- | 289 | EVQLVESGGGLV | 564 | SYAMA | 839 | WFRQAPGK | 1114 | GINKSGGITHS | 1389 |
| 124 | | QAGGSLRLSCAA | | | | EREFVA | | ADSVKG | |
| | | SGRTFS | | | | | | | |
| 14H71/1- | 290 | EVQLVESGGGLV | 565 | SLTMA | 840 | WFRQAPGK | 1115 | NIKWSGDRIVY | 1390 |
| 123 | | QAGGSLRLSCEA | | | | EREFVA | | ADSVKG | |
| | | SGLTIS | | | | | | | |
| 12D51/1- | 291 | EVQLVESGGGLV | 566 | IKSMG | 841 | WYFRQAPGK | 1116 | VIISSGTTTYAD | 1391 |
| 120 | | QPGGSLRLSCAA | | | | QRELAA | | SVKG | |
| | | SGSAFS | | | | | | | |
| 11A111/1- | 292 | EVQLVESGGGLV | 567 | SSLMG | 842 | WFRQAPGK | 1117 | AITDNGGSTYY | 1392 |
| 126 | | QAGGSLGLSCAA | | | | EREFVA | | ADSVKG | |
| | | AGRTFS | | | | | | | |
| 13G71/1- | 293 | EVQLVESGGGLV | 568 | SYAMG | 843 | WFRQAPGK | 1118 | AITSSGSTNYA | 1393 |
| 124 | | QAGGSLRLSCAA | | | | ERDFVA | | DSVKG | |
| | | SGRAFS | | | | | | | |
| 13G74/1- | 294 | EVQLVESGGGLV | 569 | TYASMG | 844 | WFRQTPGK | 1119 | AITSSGSTNYA | 1394 |
| 125 | | QAGGSLRLSCAT | | | | EREFVA | | DSVKG | |
| | | SGRTFS | | | | | | | |
| 11A71A/ | 295 | EVQLVESGGGLV | 570 | IITMG | 845 | WYRQRPGK | 1120 | TINSGGDTNYA | 1395 |
| 1-116 | | QPGGSLRLSCAA | | | | PREWVG | | GSVKG | |
| | | SGNIDG | | | | | | | |
| 22B101/1- | 296 | EVQLVESGGGLV | 571 | DYAIG | 846 | WFRQAPGK | 1121 | AISSSGISTIYG | 1396 |
| 123 | | QTGGSLRLSCAA | | | | EREFVA | | DSVKG | |
| | | SGPTFS | | | | | | | |
| 11B42/1- | 297 | EVQLVESGGGLV | 572 | NHIMG | 847 | WFRQAPGK | 1122 | HITWNGGSTYY | 1397 |
| 123 | | QAGDSLRLSCAA | | | | ERELIA | | ADSVKG | |
| | | SGFTFS | | | | | | | |
| 13E111/1- | 298 | EVQLVESGGGLV | 573 | DYAIG | 848 | WFRQAPGK | 1123 | AISGWSGGTT | 1398 |
| 124 | | QAGSSLRLSCALS | | | | EREFVA | | NYADSVKG | |
| | | GRTFS | | | | | | | |
| 14H12/1- | 299 | EVQLVESGGGLV | 574 | SAGVG | 849 | WFRQAPGK | 1124 | AISWNGVTIYY | 1399 |
| 125 | | QAGGSLRLSCIAS | | | | ERDFVA | | ADSVKG | |
| | | ERTFS | | | | | | | |
| 13G101/ | 300 | EVQLVESGGGLV | 575 | RSRVA | 850 | WFRQAPGK | 1125 | VISGVGTSYAD | 1400 |
| 1-123 | | QPGDSLRLSCSA | | | | EREFVT | | SVKG | |
| | | SEGTLS | | | | | | | |
| 13G41/1- | 301 | EVQLVESGGGLV | 576 | ADVMG | 851 | WYRQAPGK | 1126 | SISSGSAINYAD | 1401 |
| 121 | | QPGGSLTLSCVG | | | | QREFVA | | SVKG | |
| | | SGRRFS | | | | | | | |
| 22B910/1- | 302 | EVQLVESGGGLV | 577 | MNDMG | 852 | WYRQAPGK | 1127 | TLTSAGNTNYA | 1402 |
| 121 | | QPGGSLPLSCAA | | | | ORERVA | | DSVKG | |
| | | SGSIFR | | | | | | | |
| 21A81/1- | 303 | EVQLVESGGGLA | 578 | GMA | 853 | WFRRAPGK | 1128 | GIAWNGASIGS | 1403 |
| 122 | | QAGGSLRLSCAV | | | | EREFVA | | ADSVRG | |
| | | FGRSRY | | | | | | | |
| 21A92/1- | 304 | EVQLVESGGGQV | 579 | TRAMG | 854 | WFRQAPEK | 1129 | GITMSGFNTRY | 1404 |
| 127 | | QAGGSLRLSCTE | | | | EREFVA | | ADSVKG | |
| | | SGRAFN | | | | | | | |
| 22C712/1- | 305 | EVQLVESGGGLV | 580 | NYAMG | 855 | WFRQAPGK | 1130 | GISWSGGHTF | 1405 |
| 123 | | QAGGSLGLSCAA | | | | EREFVA | | YADSVKG | |
| | | SGRTFS | | | | | | | |
| 11A13/1- | 306 | EVQLVESGGGLV | 581 | SYAMG | 856 | WFRQAPGK | 1131 | TIDWSGDTAFY | 1406 |
| 125 | | QAGDSLRLSCVA | | | | EREFVA | | ADSVKG | |
| | | SGGTFG | | | | | | | |
| 13G93/1- | 307 | EVQLVESGGGLA | 582 | AYAMG | 857 | WFRQAPGK | 1132 | AVSWDGRNTY | 1407 |
| 123 | | QAGDSLRLSCVD | | | | EREFVA | | YADSVKG | |
| | | SGSSFS | | | | | | | |
| 12C52/1- | 308 | EVQLVESGGGLV | 583 | SDTMA | 858 | WFRQAPGK | 1133 | RVSWIRTTYYS | 1408 |
| 118 | | QAGGSLRLSCAV | | | | EREFVA | | DSVKG | |
| | | SGGTFE | | | | | | | |
| 12C61/1- | 309 | EVQLVESGGGLV | 584 | SNAMA | 859 | WFRQAPGN | 1134 | AIGWSGASTYY | 1409 |
| 126 | | QAGGSLRLSCAA | | | | ERELVS | | IDSVEG | |
| | | SGRTFS | | | | | | | |
| 21A61/1- | 310 | EVQLVESGGGLV | 585 | TYTMG | 860 | WFRQAPGK | 1135 | AIRWSGGTTFY | 1410 |
| 125 | | QAGDSLRLSCVA | | | | EREFVA | | GDSVKG | |
| | | SGDSFN | | | | | | | |
| 11A121/1- | 311 | EVQLVESGGGLV | 586 | SYSMG | 861 | WFRQAPGK | 1136 | AITWNGTRTYY | 1411 |
| 126 | | QAGGSLRLSCVV | | | | DREFVS | | RDSVKG | |
| | | SEGTFS | | | | | | | |
| 11A91/1- | 312 | EAQLVESGGGLV | 587 | TTMG | 862 | WFRQAPGK | 1137 | AIRWSGGSAFY | 1412 |
| 124 | | QAGGSLRLSCTA | | | | EREFVA | | ADSVKG | |
| | | SGRTYS | | | | | | | |
| 13G72/1- | 313 | EVQLVESGGGLV | 588 | SYAMG | 863 | WFRQAPGK | 1138 | AITSSGSTNYA | 1413 |
| 118 | | QAGGSLRLSCAA | | | | ERDFVA | | DSVKG | |
| | | SGRAFS | | | | | | | |
| 13E81/1- | 314 | EVQLVESGGGLV | 589 | VYHMA | 864 | WFRQAPGK | 1139 | AIRSSGGLFYA | 1414 |
| 124 | | QAGGSLRLSCAA | | | | EREFVA | | LSVSG | |
| | | SGGTFS | | | | | | | |
| 11B31/1- | 315 | EVQLVESGGGLV | 590 | VYHMG | 865 | WFRQAPGK | 1140 | AIRSGGTTLYE | 1415 |
| 124 | | QAGGSLRLSCAA | | | | EREFVA | | DSVKG | |
| | | SGGAFG | | | | | | | |
| 13G81/1- | 316 | EVQLVESGGGLV | 591 | VYHMG | 866 | WFRQAPGK | 1141 | VIRSGGTTLYA | 1416 |
| 124 | | QAGGSLRLSCAA | | | | EREFVA | | DSVKG | |
| | | SGGTFG | | | | | | | |
| 21A53/1- | 317 | EVQLVESGGGLV | 592 | VYHMG | 867 | WFRQAPGK | 1142 | AIRSGGTTLYE | 1417 |
| 124 | | QAGGSLELSCAA | | | | EREFVA | | DSVKG | |
| | | SGGAFG | | | | | | | |
| 14H51/1- | 318 | EVQLVESGGGLV | 593 | VYTMA | 868 | WFRQAPGK | 1143 | AIRSGATTLYE | 1418 |
| 124 | | QAGGSLRLSCAA | | | | EREFVA | | DSVKG | |
| | | SGGTFG | | | | | | | |
| 21A21/1- | 319 | EVQLVESGGGLV | 594 | VYHMG | 869 | WFRQAPGT | 1144 | VIRSGGTTLYE | 1419 |
| 124 | | QAGGSLRLSCAA | | | | EREFVA | | DSVKG | |
| | | SGGTFG | | | | | | | |
| 21A111/1- | 320 | EVQLVESGGGLV | 595 | PYTMA | 870 | WFRQAPGK | 1145 | VTRSGGTTFYA | 1420 |
| 124 | | QAGGSLKLSCAV | | | | EREFVA | | DSAKG | |
| | | SGRTIV | | | | | | | |
| 22B1212/ | 321 | EVQLVESGGGLV | 596 | SYAMS | 871 | WVRQAPGK | 1146 | AINSGGGSTSY | 1421 |
| 1-122 | | QPGGSLRLSCAA | | | | GLEWVS | | ADSVKG | |
| | | SGFTFS | | | | | | | |
| 11A31/1- | 322 | EVQLVESGGGLV | 597 | SGVMA | 872 | WFRQSPGE | 1147 | LITRNGETKKT | 1422 |
| 120 | | QAGGSLRLSCAA | | | | EREFLA | | ADSVKG | |
| | | SGGTFS | | | | | | | |
| 13E51/1- | 323 | EVQLVESGGGLV | 598 | GYAMG | 873 | WFRQAPGK | 1148 | AIRWSGGITYY | 1423 |
| 128 | | QAGGSLRLSCAA | | | | EREFVA | | ADSVKG | |
| | | SRHTFS | | | | | | | |
| 12D121/1- | 324 | EVQLVESGGGLV | 599 | TYGMG | 874 | WFRQAPGK | 1149 | AISRSGTGTYY | 1424 |
| 126 | | QTGGSLRLSCAA | | | | AREFVA | | AGSMKG | |
| | | SGRAFS | | | | | | | |
| 13F121/1- | 325 | EVQLVESGGGLV | 600 | DYTMG | 875 | WFRQTPGK | 1150 | RVWWNGGSA | 1425 |
| 119 | | QAGGSLRLSCAA | | | | EREFVA | | YYADSVKG | |
| | | SGRSFN | | | | | | | |
| 13G121/ | 326 | EVQLVESGGGLV | 601 | SAAMG | 876 | WFRQAPGK | 1151 | AISPIGSSKYYA | 1426 |
| 1-127 | | RAGTSLRLSCADS | | | | EREFVS | | DSVKG | |
| | | ARTFS | | | | | | | |
| 22B41/1- | 327 | EVQLVESGGGLV | 602 | GDVIG | 877 | WFRQAPGK | 1152 | AISTSGGGTDS | 1427 |
| 124 | | QPGGSLRLSCTV | | | | EREFVA | | ADSVKG | |
| | | FGRTFS | | | | | | | |
| 12D71/1- | 328 | EVQLVESGGGLV | 603 | TMG | 878 | WFRQAPGK | 1153 | AITWSGDSTNF | 1428 |
| 125 | | QAGGSLGLSCAA | | | | EREFVT | | ADSVKG | |
| | | SGRTVS | | | | | | | |
| 13F42/1- | 329 | EVQLVESGGGLV | 604 | TTGVG | 879 | WFRQAPGK | 1154 | TIFVGGTTYYS | 1429 |
| 111 | | QAGGSLRLSCVA | | | | GRESVA | | DSVKG | |
| | | SGRTLS | | | | | | | |
| 12C101/1- | 330 | EVQLVESGGGLV | 605 | TTGVG | 880 | WFRQAPGK | 1155 | TIFVGGTTYYS | 1430 |
| 111 | | QAGGSLRLSCVA | | | | ERESVA | | DSVKG | |
| | | SGRTLS | | | | | | | |
| 14H91/1- | 331 | EVQLVESGGGLV | 606 | RDVMG | 881 | WFRQAPGK | 1156 | AKTWSGASTY | 1431 |
| 127 | | QAGGSLRLSCAA | | | | EREFVA | | YADSVRG | |
| | | SGRTFS | | | | | | | |
| 13F41/1- | 332 | EVQLVESGGGLV | 607 | TTGVG | 882 | WFRQAPGK | 1157 | TIFVGGTTYYS | 1432 |
| 111 | | QAGGSLRLSCVA | | | | ERESVA | | DSVKG | |
| | | SGRTLS | | | | | | | |
| 14H21/1- | 333 | EVQLVESGGGLV | 608 | SYHIG | 883 | WFRQAPGN | 1158 | AITWNGASTSY | 1433 |
| 125 | | QAGGSLRLSCVR | | | | EREFVA | | ADSVKG | |
| | | SGGYFG | | | | | | | |
| 22B610/1- | 334 | EVQLVESGGGLV | 609 | INAMG | 884 | WYRPAPGK | 1159 | RITSTGSTNYA | 1434 |
| 120 | | QPGGSLRLSCAA | | | | QRELVA | | DSVKG | |
| | | SGSIFS | | | | | | | |
| 12C32/1- | 335 | EMQLVESGGGLV | 610 | TYTMA | 885 | WFRQAPGK | 1160 | AIKSSDNSTSY | 1435 |
| 127 | | QAGGSLRLSCAT | | | | EREFVV | | RDSVKG | |
| | | SERTFS | | | | | | | |
| 12D61/1- | 336 | EVQLVESGGGLV | 611 | PNVVG | 886 | WYRQAPGK | 1161 | AVTSGGITNYA | 1436 |
| 116 | | QPGGSLRLSCAA | | | | QRELVA | | DSVKG | |
| | | SRSIFS | | | | | | | |
| 13G31/1- | 337 | EVQLVESGGGLV | 612 | RYKMG | 887 | WFRQAPGK | 1162 | ASRWSGGIKY | 1437 |
| 125 | | QAGGSLRLSCAA | | | | EREFVA | | HADSVKG | |
| | | SGGTFS | | | | | | | |
| 22C65/1- | 338 | EVQLVESGGGLV | 613 | SYAMG | 886 | WFRQAPGK | 1163 | AIRWSGSATDY | 1438 |
| 124 | | QAGGSLRLSCAV | | | | EREFVA | | SDSVKG | |
| | | SGFLFD | | | | | | | |
| 11A71/1- | 339 | EVQLVESGGGLV | 614 | VSVMG | 889 | WYRLAPGN | 1164 | TITADGITNYAD | 1439 |
| 125 | | QPGGSLRLSCAA | | | | QRELVA | | SVKG | |
| | | SRSIRS | | | | | | | |
| 11B91/1- | 340 | EVQLVESGGALV | 615 | INTMG | 890 | WYRQAPGN | 1165 | AVTEGGTTSYA | 1440 |
| 125 | | QPGGSLRLSCAA | | | | QREFVA | | ASVKG | |
| | | SGSIRS | | | | | | | |
| 11A81/1- | 341 | EVQLVESGGALV | 616 | INIMG | 891 | WYRQAPGK | 1166 | AVTEDGSINYA | 1441 |
| 125 | | QPGGSLRLSCAA | | | | QREFVA | | ESVKG | |
| | | SDSIRS | | | | | | | |
| 11B121/1- | 342 | EVQLVESGGGLV | 617 | INTMG | 892 | WYRQAPGE | 1167 | EITEGGIINYTD | 1442 |
| 127 | | QPGGSLRLSCAA | | | | QRELVA | | SVKG | |
| | | SGSSAS | | | | | | | |
| 12D31/1- | 343 | EVQLVESGGGLV | 618 | FNDMG | 893 | WYRQGPGK | 1168 | LINVGGVAKYE | 1443 |
| 115 | | QPGGSLRLSCAA | | | | EREFVA | | DSVKG | |
| | | SRNIFD | | | | | | | |
| 11B51/1- | 344 | EVQLVESGGGLV | 619 | GRGMG | 894 | WFRQAPGK | 1169 | AVSWSGGNTY | 1444 |
| 127 | | QAGGSLRLSCAA | | | | EREFVA | | YADSVKG | |
| | | SGGTFS | | | | | | | |
| 13G51/1- | 345 | EVQLVESGGGLV | 620 | GRAVG | 895 | WFRQAPGE | 1170 | GISWSGGSTD | 1445 |
| 127 | | QAGGSLSLSCAA | | | | EREFVT | | YADSVKG | |
| | | SGGTFN | | | | | | | |
| 13F82A/1- | 346 | EVQLVESGGGLV | 621 | GRAMG | 896 | WFRQAPGK | 1171 | FVAATSWSGG | 1446 |
| 130 | | QAGGSLRLSCAIS | | | | EREFRE | | SKYVADSVTG | |
| | | GRTLS | | | | | | | |
| 13E101/1- | 347 | EVQLVESGGGLV | 622 | NDHMG | 897 | WFRQAPGT | 1172 | ATGRRGGPTY | 1447 |
| 128 | | QAGGSLRLSCAV | | | | ERELVA | | YADSVKG | |
| | | SGRTFN | | | | | | | |
| 22B85/1- | 348 | EVQLVESGGGLV | 623 | INAMG | 898 | WYRQAPGN | 1173 | TITGSTGTTYA | 1448 |
| 120 | | RPGGSLRLSCAT | | | | QRELVA | | DSVKG | |
| | | SGSDIG | | | | | | | |
| 11B12/1- | 349 | EVQLVESGGGLV | 624 | NYAMG | 899 | WFRQAPGK | 1174 | AINWSGSHTDY | 1449 |
| 118 | | QAGGSLRLSCAA | | | | EREFVS | | GDSVKG | |
| | | SGRALI | | | | | | | |
| 13G61/1- | 350 | EVQLVESGGGVV | 625 | SYVMG | 900 | WVRQAPGK | 1175 | GITRNSGRTRY | 1450 |
| 118 | | QAGGSLRLSCAP | | | | AREFVA | | ADSVKG | |
| | | SGRTFS | | | | | | | |
| 14H41/1- | 351 | EVQLVESGGGLV | 626 | SYVMG | 901 | WVRQAPGK | 1176 | GITRNSIRTRYA | 1451 |
| 118 | | QAGGSLRLSCAP | | | | AREFVA | | DSVKG | |
| | | SGRTFS | | | | | | | |
| 11B81/1- | 352 | EVQLVESGGGLV | 627 | NYIMG | 902 | WFRQALGQ | 1177 | AINRNGATAAY | 1452 |
| 126 | | QAGGSLRLSCAA | | | | GREFVA | | ADSVKG | |
| | | SGRPVN | | | | | | | |
| 11C11/1- | 353 | EVQLVESGGGLV | 628 | AYAMG | 903 | WFRQAPGK | 1178 | TIRWTGGSSST | 1453 |
| 121 | | QAGGSLRLSCAA | | | | ERESVA | | SYADSVKG | |
| | | SGRTFS | | | | | | | |
| 12D92/1- | 354 | EVQLVESGGGLV | 629 | MA | 904 | WFRQAPGK | 1179 | AMNWSGGSTK | 1454 |
| 123 | | QAGGSLRLSCAA | | | | EREFVA | | YAESVKG | |
| | | SGRTYN | | | | | | | |
| 13E61/1- | 355 | EVQLVESGGGLV | 630 | MG | 905 | WFRQAPGK | 1180 | AISWSQYNTKY | 1455 |
| 123 | | QAGGSLRLSCTA | | | | EREFVA | | ADSVKG | |
| | | SGQTFN | | | | | | | |
| 22B71/1- | 356 | EVQLVESGGAFV | 631 | FNVMG | 906 | WYRQGPGQ | 1181 | SITYGGNINYG | 1456 |
| 114 | | QPGGSLRLSCAA | | | | QLELVA | | DPVKG | |
| | | SGSDVW | | | | | | | |
| 21A121/1- | 357 | EVQLVESGGGLV | 632 | MG | 907 | WFRQAPGK | 1182 | GVNWGGGSTK | 1457 |
| 123 | | QAGGSLRLSCTA | | | | EREFVA | | VADSVKE | |
| | | SGRAFN | | | | | | | |
| 13F101/1- | 358 | EVQLVESGGGLV | 633 | DLHMG | 908 | WFRQAPGK | 1183 | FTRWPSITYIAE | 1458 |
| 124 | | QAGGSLRLSCQL | | | | EREFVG | | HVKG | |
| | | SGGTVS | | | | | | | |
| 11A43/1- | 359 | EVQLVESGGGLV | 634 | VNHMG | 909 | WYRQAPGK | 1184 | AITSDHITWYA | 1459 |
| 123 | | QAGGSLRLSCAA | | | | QREFVA | | DAVKG | |
| | | SGSIFR | | | | | | | |
| 12C81/1- | 360 | EVQLVESGGGLV | 635 | DNTMA | 910 | WYRQAPGN | 1185 | TINVGGGTYYA | 1460 |
| 117 | | QPGGSLRLSCAG | | | | QRDLVA | | GPVKG | |
| | | SGNIVR | | | | | | | |
| 11B21/1- | 361 | EVQLVESGGGLV | 636 | MYLMG | 911 | WFRQAPGK | 1186 | TINRRGGNTYY | 1461 |
| 124 | | QAGGSLRLSCAA | | | | EREFVS | | ADSVKG | |
| | | SGRTFS | | | | | | | |
| 11B71/1- | 362 | EVQLVESGGGLV | 637 | RYAMG | 912 | WFRQAPGK | 1187 | TISWSGGRDTV | 1462 |
| 126 | | QAGGSLRLSCAA | | | | EREFVA | | YADSVKG | |
| | | SGRTFE | | | | | | | |
| 12C121/1- | 363 | EVQLVESGGDLV | 638 | YSGIG | 913 | WFRQAPEK | 1188 | CIESGDGTTTY | 1463 |
| 126 | | QPGESLRLSCAV | | | | EREAVS | | VDSVKG | |
| | | SGVTVD | | | | | | | |
| 22C51/1- | 364 | EVQLVESGGGLV | 639 | RYDIG | 914 | WFRQAPGK | 1189 | AINWSGGTTSF | 1464 |
| 121 | | QAGASLRLSCAA | | | | GREFVA | | GDSVKG | |
| | | SGRTFS | | | | | | | |
| 12D11/1- | 365 | EVQLVESGGGLV | 640 | GSRMG | 915 | WFRQAPGK | 1190 | AIRWSGGITWY | 1465 |
| 123 | | QTGGSLRLSCAA | | | | EREFVA | | AESVKS | |
| | | SGRTFS | | | | | | | |
| 12D14/1- | 366 | EVQLVESGGGLV | 641 | GSRMG | 916 | WLRQAPGK | 1191 | AVRWSGGITW | 1466 |
| 123 | | QAGGSLRLSCAA | | | | EREFVA | | YAESVKG | |
| | | SGRTFS | | | | | | | |
| 12C111/1- | 367 | EVQLVESGGGLV | 642 | SYAMG | 917 | WFRQAPGK | 1192 | TISRSGGRTSY | 1467 |
| 123 | | QAGGSLRLSCAV | | | | VREFVA | | ADSVKG | |
| | | SGLTFS | | | | | | | |
| 22B55/1- | 368 | EVQLVESGGGLV | 643 | TYAMG | 918 | WFRQAPGK | 1193 | TISRSGGRTSY | 1468 |
| 123 | | QAGGSLRLSCAV | | | | VREFVA | | ADSVKG | |
| | | SGLTFS | | | | | | | |
| 14H121/1- | 369 | EVQLVESGGGLV | 644 | FKAMG | 919 | WFRQGPGK | 1194 | RIAGGSTNYAD | 1469 |
| 113 | | QPGGSLRLSCAA | | | | RRELVA | | SVKG | |
| | | SGITFR | | | | | | | |
| 12C71/1- | 370 | EVQLVESGGGLV | 645 | SYALG | 920 | WFRQSPGK | 1195 | AIDWDGSRTQ | 1470 |
| 125 | | QAGGSLRLSCTA | | | | ERESVA | | YADSVKG | |
| | | SGGTFG | | | | | | | |
| 21A31/1- | 371 | EVQLVESGGGLV | 646 | SVAMG | 921 | WFRQGPGK | 1196 | TITWSGDSTYV | 1471 |
| 125 | | QAGGSLRLSCAA | | | | EREFAA | | TDSVKG | |
| | | SEPTFS | | | | | | | |
| 12C91/1- | 372 | EVQLVESGGGLV | 647 | YYHMA | 922 | WFRQAPGK | 1197 | AINLSSGSTYY | 1472 |
| 121 | | QAGGSLRLSCVA | | | | EREFIA | | PDSVKG | |
| | | SGRTSS | | | | | | | |
| 14H81/1- | 373 | EVQLVESGGGLV | 648 | NYRMA | 923 | WFRQAPRK | 1198 | AISRSGESTYF | 1473 |
| 125 | | QAGGSLSLSCAA | | | | EREFVA | | ADSMKG | |
| | | SGRTFS | | | | | | | |
| 12C42/1- | 374 | EVQLVESGGGLV | 649 | RYAMH | 924 | WFRQAPGS | 1199 | GISWDGGSTF | 1474 |
| 124 | | QAGGSLRLSCAA | | | | ERDFVA | | YANSVKG | |
| | | SGRTFS | | | | | | | |
| 12D102/1- | 375 | EVQLVESGGGLV | 650 | FNAMG | 925 | WSREAPGK | 1200 | RIISDDSTLYAD | 1475 |
| 118 | | QPGGSLRLSCAA | | | | RRELVA | | SVKG | |
| | | SGSSLS | | | | | | | |
| 11A52/1- | 376 | EVQLVESGGGLV | 651 | NYAMR | 926 | WFRQAPGK | 1201 | TINWSGSHTDY | 1476 |
| 120 | | QAGGSLRLSCAA | | | | EREFVA | | ADSVKG | |
| | | SGRALS | | | | | | | |
| 14H111/1- | 377 | EVQLVESGGGLV | 652 | SFAMR | 927 | WFRQAPGK | 1202 | AINWSGTHTDY | 1477 |
| 120 | | QAGGSLRLSCAA | | | | EREFVA | | ADSVKG | |
| | | SGRALI | | | | | | | |
| 11B61/1- | 378 | EVQLVESGGGLV | 653 | GYGMG | 928 | WFRQAPGK | 1203 | AVGWYGSTYF | 1478 |
| 120 | | QAGGSLRLSCAA | | | | EREFVA | | ADSVKG | |
| | | SGRTSS | | | | | | | |
| 12E42/1- | 379 | EVQLVESGGGLV | 654 | LRTMG | 929 | WYRQAPGN | 1204 | LISAGDSTYYP | 1479 |
| 118 | | QPGGSLRLSCAH | | | | QRELVA | | DSVKG | |
| | | SGRAFS | | | | | | | |
| 13F81A/1- | 380 | EVQLVESGGGLV | 655 | RYAMG | 930 | WFRQAPGK | 1205 | AISWTGGSSYY | 1480 |
| 128 | | QAGGSLRLSCAA | | | | EREFVA | | GDSVKG | |
| | | SGRTFS | | | | | | | |
| 11B102/1- | 381 | EVQLVESGGGLV | 656 | SHAIS | 931 | WFRQAPGK | 1206 | AINWSGSHRD | 1481 |
| 118 | | QAGGSLRLSCAA | | | | AREFVA | | YADSAKG | |
| | | SGGIFS | | | | | | | |
| 21A41/1- | 382 | EVQLVESGGGLV | 657 | NYAWS | 932 | WFRQAPGK | 1207 | AINWSGGYTD | 1482 |
| 120 | | QAGGSLRLSCAA | | | | ERGFVA | | YADSVKG | |
| | | SGRIFS | | | | | | | |
| 14H101/1- | 383 | EVQLVESGGGLV | 658 | SSPMG | 933 | WFRQAPGK | 1208 | ATTRSGGLPYY | 1483 |
| 128 | | QAGGSLRLSCAA | | | | EREVVA | | SDSVKG | |
| | | SGRTFI | | | | | | | |
| 12E21/1- | 384 | EVQLVESGGGLV | 659 | IHVVG | 934 | WYRKAPGK | 1209 | YIGTAGATHYA | 1484 |
| 115 | | QPGGSLRLSCAA | | | | QREVVA | | DSVKG | |
| | | SGSIDS | | | | | | | |
| 13F21/1- | 385 | EVQLVESGGGLV | 660 | INATS | 935 | WYRQAPGN | 1210 | TIIGDGRTHYA | 1485 |
| 123 | | QSGGSLRLSCVA | | | | QRELVA | | DSVKD | |
| | | SGTIVS | | | | | | | |
| 12E33/1- | 386 | EVQLVESGGGMV | 661 | NYGMG | 936 | WFRQAPGK | 1211 | SINWSGTHTYD | 1486 |
| 119 | | QAGGSLRLSCAA | | | | EREFVS | | ADFVKG | |
| | | SGLTLS | | | | | | | |
| 13G11/1- | 387 | EVQLVESGGGLV | 662 | SNYAMG | 937 | WFRQAPGK | 1212 | TINWSGSHSDY | 1487 |
| 122 | | QAGGSLRLSCAA | | | | EREFVA | | ADSVKG | |
| | | SGRTFI | | | | | | | |
| 118N121_A6_2_OK/ | 388 | EVQLVESGGGLV | 663 | GYSVG | 938 | WFRQSPGK | 1213 | GINWSGRTYY | 1488 |
| 1-123 | | QAGGSLRLSCVA | | | | EREFVG | | VDSVKG | |
| | | SGRTFS | | | | | | | |
| 118N121_B8_1_OK/ | 389 | EVQLVESGGGLV | 664 | FASYAMG | 939 | WFRQAPGK | 1214 | AIRGSGGSTYI | 1489 |
| 1-135 | | QDGGSLRLSCAA | | | | AREFVA | | ADPARSTYYAD | |
| | | SGQLAN | | | | | | FVKG | |
| 118N121_A2_2_OK/ | 390 | KVQLVESGGGLV | 665 | NYSVG | 940 | WFRQAPGK | 1215 | ALSKDGARTYY | 1490 |
| 1-124 | | QAGGSLRLSCAA | | | | EREFVA | | AASVKG | |
| | | SGRTFS | | | | | | | |
| 118N121_A8_2_OK/ | 391 | EVQLVESGGGLV | 666 | SHAMG | 941 | WFRQAPGE | 1216 | TIRWSGSATFY | 1491 |
| 1-124 | | QAGGSLTLSCVIS | | | | EREFVA | | SDSVKG | |
| | | GLTLE | | | | | | | |
| 118N121_B3_1_OK/ | 392 | EVQLVESGGGLV | 667 | DLALG | 942 | WFRRAPGK | 1217 | AISSSGVTTIYA | 1492 |
| 1-123 | | QPGGSLRLSCAA | | | | EREHVA | | DSVRG | |
| | | SGRTFS | | | | | | | |
| 118N121_A5_2_OK/ | 393 | EVQLVESGGGSV | 668 | TNAMG | 943 | WHRQVSGK | 1218 | IVTDGFTNYAD | 1493 |
| 1-114 | | QPGGSLRLSCVA | | | | ERELVA | | FAKG | |
| | | SGSISS | | | | | | | |
| 118N121_A9_2_OK/ | 394 | EVQLVESGGGSV | 669 | VNAMG | 944 | WHRQVPGK | 1219 | IVTDGFTNYAD | 1494 |
| 1-114 | | QPGGSLRLSCVA | | | | QRELVA | | FAKG | |
| | | SGSISS | | | | | | | |
| 118N121_A7_1_OK/ | 395 | EVQLVESGGGLV | 670 | IDVMG | 945 | WHRQAPGK | 1220 | DISFGGNTNYA | 1495 |
| 1-122 | | QPGGSLRLSCAA | | | | ERELVS | | NSVKG | |
| | | SGNIKS | | | | | | | |
| 118N121_A10_1_OK/ | 396 | EVQLVESGGGLV | 671 | DYAIG | 946 | WFRQAPGK | 1221 | CIANSEGTKYY | 1496 |
| 1-131 | | QAGGSLRLSCAA | | | | EREGVS | | ADSAQG | |
| | | SGFSFA | | | | | | | |
| 118N121_A11_1_OK/ | 397 | EVQLVESGGGLV | 672 | MYGMR | 947 | WVRQAPGK | 1222 | SINSDGDTTYY | 1497 |
| 1-120 | | QPGGSLRLSCAA | | | | GPERVS | | ADSVKG | |
| | | SGFPFG | | | | | | | |
| 118N121_B7_4_OK/ | 398 | EVQLVESGGGLE | 673 | SAAMG | 948 | WFRQAPGK | 1223 | AISRDGAATYY | 1498 |
| 1-124 | | QAGGSLRLSCAA | | | | EREFVA | | TDSVKG | |
| | | SGLTFR | | | | | | | |
| 118N121_B2_1_OK/ | 399 | EVQLVESGGGLV | 674 | DRAIA | 949 | WFRQAPGK | 1224 | CITPHHGGIIFT | 1499 |
| 1-130 | | QAGGSLRLSCAA | | | | AREGVS | | RESVKG | |
| | | SGFSLD | | | | | | | |
| 118N121_B7_1_OK/ | 400 | EMQLVESGGGLV | 675 | INAMA | 950 | WYRQAPGN | 1225 | AVTSGGGTNY | 1500 |
| 1-119 | | QPGGSLRLSCAA | | | | ERELVA | | ATSVKG | |
| | | SGNIPP | | | | | | | |

| Clone | FR3 | ID | CDR 3 | ID | FR4 |
|---|---|---|---|---|---|
| 13D11 | RFTISRDNAKNTLFLQMNS | 1501 | GWKIVPTNP | 1776 | RGHGTQVTVSS |
| | LNPEDTAVYYCGQ | | | | |
| 264 | RFTISRDNAKNTLFLQMNS | 1502 | GWKIRPTIP | 1777 | MGHGTQVTVSS |
| | LSPEDTAVYYCNQ | | | | |
| 2G2 | RFTISRDNAKNTLFLQMNN | 1503 | GWKIVPTDL | 1778 | GGHGTQVTVSS |
| | LTPEDTAVYYCNR | | | | |
| 13D2 | RFTISRDNAKNTLFLQMNN | 1504 | GWKIVPTDR | 1779 | GGHGTQVTVSS |
| | LRSEDTAVYSCNQ | | | | |
| 2D5 | RFTISRDNAKNTLFLQMNS | 1505 | GWKIVPTDR | 1780 | GGHGTQVTVSS |
| | LRSEDTAVYYCNQ | | | | |
| 2F4 | RFTISRDNAKNTLFLQMNS | 1506 | GWKIVPTDR | 1781 | RGHGTQVTVSS |
| | LRSEDTAVYYCNQ | | | | |
| 2C3 | RFTISRDNAKNTLFLQMNS | 1507 | GWKIVPTDR | 1782 | TGHGTQVTVSS |
| | LRSEDTAVYYCNQ | | | | |
| 17E3 | RFTISRDNAKNTVYLEMNS | 1508 | GWKIVPTDR | 1783 | TGHGTQVTVSS |
| | LTPEDTAVYYCNQ | | | | |
| 17H3 | RFTISRDNAKNTLFLQMNS | 1509 | GWKIVPTDR | 1784 | GGHGTQVTVSS |
| | LRSEDTAVYYCNQ | | | | |
| 17D2 | RFTISRDNAKNTLFLQMNS | 1510 | GWKIVPTDR | 1785 | GSHGTQVTVSS |
| | LRSEDTAVYYCNQ | | | | |
| 2F1 | RFTISRDNAKNTLFLQMNS | 1511 | GWKIVPMDR | 1786 | RGHGTQVTVSS |
| | LTPEDTAVYYCNQ | | | | |
| 2E2 | RFTISRDNAKNTLFLQMNS | 1512 | GWKIIPTDR | 1787 | RGHGTQVTVSS |
| | LTPEDTAVYYCNQ | | | | |
| 2C2 | RFTISRDNARNTLFLQMNS | 1513 | GWKILPTDR | 1788 | RGHGTQVTVSS |
| | LTPEDTAIYYCNQ | | | | |
| 2E3 | RFTISRDNAKNTLFLQMNS | 1514 | GWKILPTNR | 1789 | GSHGTQVTVSS |
| | LSPEDTAVYYCNQ | | | | |
| 13B10 | RFTISRDNAKNTLFLQMNS | 1515 | GWKILPTNR | 1790 | GSHGTQVTVSS |
| | LSPEDTAVYYCNQ | | | | |
| 2D1 | RFTISRDNAKNTLFLQMNS | 1516 | GWKILPTNR | 1791 | GSHGTQVTVSS |
| | LSPEDTAVYYCNR | | | | |
| 2H3 | RFTISRDNAKNTLFLQMNS | 1517 | GWKIIPTDR | 1792 | RGHGTQVTVSS |
| | LTPEDTAVYYCNQ | | | | |
| 2H1 | RFVISRDNAKNTLFLQMNS | 1518 | GWKIIPTDR | 1793 | RGHGTQVTVSS |
| | LSPEDTAVYYCNQ | | | | |
| 2C1 | RFTISRDNAKNTLFLQMNS | 1519 | GWKIIPTDR | 1794 | RGHGTQVTVSS |
| | LTPEDTAVYYCNQ | | | | |
| 15C5 | RFTISRDNAKNTLFLQMNS | 1520 | GWKIIPTDR | 1795 | RGHGTQVTVSS |
| | LTPEDTAVYYCNQ | | | | |
| 2B3 | RFTISRDNAKNTLFLQMNS | 1521 | GWKIIPTDR | 1796 | RGHGTQVTVSS |
| | LTPEDTAVYYCNQ | | | | |
| 29H2 | RFTISRDNAKNTLFLQMNN | 1522 | GWKIIPTDR | 1797 | RGHGTQVTVSS |
| | LTPEDTAVYYCNQ | | | | |
| 17E4 | RFVISRDNAKNTLFLQMNS | 1523 | GWKIIPTDR | 1798 | RGHGTQVTVSS |
| | LSPEDTAVYYCNQ | | | | |
| 17A2 | RFTISRDNAKNTLFLQMNS | 1524 | GWKVWPTDR | 1799 | GTHGTQVTVSS |
| | LSPEDTAVYYCNK | | | | |
| 15D1 | RFTISRDNAKNTLFLQMNS | 1525 | GWKVWPTDR | 1800 | GTHGTQVTVSS |
| | LNPEDTAVYYCNQ | | | | |
| 17B8 | RFTISRDNAKNTLFLQMNS | 1526 | GWKILPAER | 1801 | RGHGTQVTVSS |
| | LTPEDTAVYYCNQ | | | | |
| 15C11 | RFTISRDNAKNTLFLQMNS | 1527 | GWKILPAER | 1802 | RGHGTPVTVSS |
| | LTPEDTAVYYCNQ | | | | |
| 15G8 | RFTISRDNAKNTLFLQMNS | 1528 | GWKILPAER | 1803 | RGHGTQVTVSS |
| | LTPENTAVYYCNQ | | | | |
| 17H14 | RFTISRDNAKNTLFLHMNN | 1529 | GWKIHPADR | 1804 | GGHGTQVTVSS |
| | LSPEDTAVYYCGQ | | | | |
| 27G8 | RFTISRDNAKNTLFLQMNS | 1530 | GWKILPAER | 1805 | RGHGTQVTVSS |
| | LTPEDTAVYYCNQ | | | | |
| 38C6 | RFTISRDNAKNTLFLQMNS | 1531 | GWKIRPTIP | 1806 | MGHGTQVTVSS |
| | LSPEDTAVYYCNQ | | | | |
| 2A4 | RFTISRDNAKKTVYLQMNS | 1532 | GWQSTTKN | 1807 | WGQGTQVTVSS |
| | LQSEDTAVYYCGT | | QGY | | |
| 15G7 | RFTISRDNNKKTVYLQMN | 1533 | GWQSTTKN | 1808 | WGQGTQVTVSS |
| | SLKSEDTAVYYCAT | | QGY | | |
| 15B7 | RFTISRDNAKKTVYLQMNS | 1534 | GWQSTTKS | 1809 | WGQGTQVTVSS |
| | LQSEDTAVYYCGT | | QGY | | |
| 5G4 | RFTISRDNAKKTLYLQMNS | 1535 | GWQSTTKN | 1810 | WGQGTQVTVSS |
| | LKSEDTAVYYCAT | | QNY | | |
| 13B2 | RFTISRNNANNTLYLQMN | 1536 | NWRDAGTT | 1811 | AGQGTQVTVSS |
| | NLKFEDTAVYYCAK | | WFEKSGS | | |
| 2E5 | RFTISRNNANNTLYLQMN | 1537 | NWRDAGTT | 1812 | AGQGTQVTVSS |
| | NLKFEDTAVYYCAK | | WFEKSGS | | |
| 15G1 | RFTISRNNANNTLYLQMNS | 1538 | NWRDAGTT | 1813 | AGQGTQVTVSS |
| | LKSEDTAVYYCAK | | WFEKSGS | | |
| 27B1 | RFTISRNNANNTLYLQMN | 1539 | NWRDAGTT | 1814 | AGQGTQVTVSS |
| | NLKFEDTAVYYCAK | | WFEKSGS | | |
| 17E7 | RFTISRNNANNTLYLQMNS | 1540 | NWRDAGTT | 1815 | AGQGTQVTVSS |
| | LKSEDTAVYYCAK | | WFEKSGS | | |
| 17D8 | RFTISRNNANNMLYLQMN | 1541 | NWRDAGTT | 1816 | AGQGTQVTVSS |
| | SLKSEDTAVYYCAK | | WFEKSGS | | |
| 5F8 | RFTISRNNANNTLYLQMN | 1542 | NWRDAGTT | 1817 | AGQGTQVTVSS |
| | NLKFEDTAVYYCAK | | WFEKSGS | | |
| 2D4 | RFTISRNNANNTLYLQMNS | 1543 | NWGDAGTT | 1818 | AGPGTQVTVSS |
| | LKSDDTAVYYCAK | | WFEKSGS | | |
| 13D8 | RFTISRNNANNTLYLQMNS | 1544 | NWGDAGTT | 1819 | AGQGTQVTVSS |
| | LKSEDTAVYYCAK | | WFEKSGS | | |
| 17G8 | RFTISRNNANNTLYLQMNS | 1545 | NWGDAGTT | 1820 | AGQGTQVTVSS |
| | LKSEDTAVYYCAK | | WFEKSGS | | |
| 2H4 | RFTISRNNANNTLYLQMNS | 1546 | NWGDAGTT | 1821 | AGQGTQVTVSS |
| | LKSEDTAVYYCAK | | WFEKSGS | | |
| 2F3 | RFTISRNNANNTLYLQMNS | 1547 | NWGDAGTT | 1822 | AGPGTQVTVSS |
| | LKSDDTAVYYCAK | | WFEKSGS | | |
| 2F5 | RFTISRNNANNTLYLQMNS | 1548 | NWGDAGTT | 1823 | AGQGTQVTVSS |
| | LKSEDTAVYYCAK | | WFEKSGS | | |
| 30E10 | RFTISRNNANNTLYLQMNS | 1549 | NWGDAGTT | 1824 | AGQGTQVTVSS |
| | LKSEDTAVYYCAK | | WFEKSGS | | |
| 29H1 | RFTISRNNANNTLYLQMNS | 1550 | NWGDAGTT | 1825 | AGQGTQVTVSS |
| | LKSEDTAVYYCAK | | WFEKSGS | | |
| 17E2 | RFTISRNNANNTLYLQMNS | 1551 | NWGDAGTT | 1826 | AGQGTQVTVSS |
| | LKSEDTAVYYCAK | | WFEKSGS | | |
| 2B1 | RFTISRNNANNTLYLQMNS | 1552 | NWGDAGTT | 1827 | AGPGTQVTVSS |
| | LKSDDTAVYYCAK | | WFEKSGS | | |
| 2A5 | RFTISRNNANNTLYLQMNS | 1553 | NWGDAGTT | 1828 | AGQGTQVTVSS |
| | LKSEDTAVYYCAK | | WFEKSGS | | |
| 13C12 | RFTISRNNANNTLYLQMNS | 1554 | NWGDAGTT | 1829 | AGQGTQVTVSS |
| | LKSEDTAVYYCAK | | WFEKSGS | | |
| 17E10 | RFTISRNNANNTLYLQMNS | 1555 | NWGDAGTT | 1830 | AGQGTQVTVSS |
| | LKSEDTAVYYCAK | | WFEKSGS | | |
| 27D4 | RFTISRNNANNTLYLQMNS | 1556 | NWGDAGTT | 1831 | AGQGTQVTVSS |
| | LKSEDTAVYYCAK | | WFEKSGS | | |
| 15F9 | RFTISRNNANNTLYLQMNS | 1557 | NWGDAGTT | 1832 | AGQGTQVTVSS |
| | LKSDDTAVYYCAK | | WFEKSGS | | |
| 30H9 | RFTISRNNANNTLYLQMNS | 1558 | NWGDAGTT | 1833 | AGQGTQVTVSS |
| | LKSEDTAVYYCAK | | WFEKSGS | | |
| 39C1 | RFTISRNNANNTLYLQMNS | 1559 | NWGDAGTT | 1834 | AGQGTQVTVSS |
| | LKSEDTAVYYCAK | | WFEKSGS | | |
| 27G2 | RFTISRNNANNTLYLQMNS | 1560 | NWGDAGTT | 1835 | AGPGTQVTVSS |
| | LKSDDTAVYYCAK | | WFEKSGS | | |
| 2D3 | RFTISRNNANNTLYLQMNS | 1561 | NWRDAGTT | 1836 | AGQGTQVTVSS |
| | LKSEDTAVYYCAK | | WFEKSGS | | |
| 5F7 | RFTISRDNAKNTVYLQMN | 1562 | FRTAAQGTDY | 1837 | WGQGTQVTVSS |
| | SLKPEDTAVYYCKR | | | | |
| 118N121_A1_4_OK/ | RFTISRDNAKNTLHLQMNS | 1563 | HKTPYTTLE | 1838 | WGQGTQVTVSS |
| 1-127 | LKPEDTAVYYCAY | | LNRPHAFGS | | |
| 47D5 | RFTISRVNAKDTVYLQMNS | 1564 | DQRLDGSTL | 1839 | WGQGTQVTVSS |
| | LKPEDTAVYYCYM | | AY | | |
| 14B11 | RFTISRDNAKKTVYLQMNS | 1565 | ETYGSGSSL | 1840 | WGQGTQVTVSS |
| | LKPEDTARYYCGV | | MTEYDY | | |
| 14B10 | RFTISRDNAKETVYLQMNS | 1566 | ETYGSGSSL | 1841 | WGQGTQVTVSS |
| | LKPDDTGVYYCAA | | MSEYDY | | |
| 14B4 | RFTISRDNAKETVYLQMNS | 1567 | ETYGSGSSL | 1842 | WGQGTQVTVSS |
| | LKPEDTGVYYCAA | | MSEYDY | | |
| 14C11 | RFTISRDNAKETVYLQMNS | 1568 | ETYGSGSSL | 1843 | WGQGTQVTVSS |
| | LKPDDTGVYYCAA | | MSEYDY | | |
| 14B5 | RFTISRDNAKETVYLQMNS | 1569 | ETFGSGSSL | 1844 | WGQGTQVTVSS |
| | LKPDDTGVYYCAA | | MSEYDY | | |
| 14C6 | RFTISRDNAKKTVYLQMNS | 1570 | DTYGSGSSL | 1845 | WGQGTQVTVSS |
| | LKPEDTAVYYCAT | | MNEYDY | | |
| 14A4 | RFTISRDNAKKTAYLQMNS | 1571 | ETYGSGSSL | 1846 | WGQGTQVTVSS |
| | LKPEDTAVYYCAA | | MNEYDY | | |
| 14B3 | RFTISRDNAKKTAYLQMNS | 1572 | ETYGSGSSL | 1847 | WGQGTQVTVSS |
| | LKPEDTAVYYCAA | | MNEYDY | | |
| 14C1 | RFTISRDNAKKTVYLQMNS | 1573 | ETYGSGSSL | 1848 | WGQGTQVTVSS |
| | LKPEDTAVYYCAT | | MNEYDY | | |
| 14A12 | RFTISRDNAKKTVYLQMNS | 1574 | EPYGSGSSL | 1849 | WGHGTQVTVSS |
| | LKPEDTAVYYCAA | | ISEYDY | | |
| 14A2 | RFTISRDNAKKTVYLQMNS | 1575 | EPYGSGSSL | 1850 | WGHGTQVTVSS |
| | LKPEDTAVYYCAA | | ISEYDY | | |
| 14A1 | RFTISRDNAKKTVYLQMNS | 1576 | EPYGSGSSL | 1851 | WGHGTQVTVSS |
| | LKPEDTAVYYCAA | | MSEYDY | | |
| 17C3 | RFTMARDNANHTVHLQM | 1577 | NWKMLLGV | 1852 | WGQGTQVTVSS |
| | NSLKPEDTAVYYCNA | | ENDY | | |
| 46D3 | RFTVSRDIAENTVYLQMNT | 1578 | KIGWLSIRG | 1853 | WGQGTQVTVSS |
| | LKSEDTAVYYCAA | | DEYEY | | |
| 27H5 | RFTISSDNAKNTVYLQMNS | 1579 | LPFVCPSGS | 1854 | WGQGTQVTVSS |
| | LKPEDTAVYYCAA | | YSDYGDEY | | |
| | | | DY | | |
| 17C2 | RFTISRDNAKNTLYLQMSS | 1580 | HVSDSDYTE | 1855 | WGQGTQVTVSS |
| | LKPEDTALYYCTK | | YDY | | |
| 17D11 | RFTISRDNAKNTLYLQMNS | 1581 | RRSSLYTSS | 1856 | WGQGTQVTVSS |
| | LKPEDTAVYYCAA | | NVFEYDY | | |
| 15A6 | RFTVSRDNANNTVYLQMN | 1582 | VNADY | 1857 | WGQGTQVTVSS |
| | TLKPEDTAVYYCRD | | | | |
| 17B6 | RFTVSRDNAKNTVYLQMN | 1583 | VNADY | 1858 | WGQGTQVTVSS |
| | SLKAEDTAVYYCWD | | | | |
| 17C5 | RFTVSRDNANNTVYLQMN | 1584 | VNADY | 1859 | WGQGTPVTVSS |
| | TLKPEDTAVYYCRD | | | | |
| 15E11 | RFTVSRDNDKNTLYLQMN | 1585 | VNADY | 1860 | WGQGTQVTVSS |
| | SLKPEDTAVYYCRD | | | | |
| 15C2 | RFTVSRDNANNTVYLQMN | 1586 | VNADY | 1861 | WGQGTQVTVSS |
| | TLKPEDTAVYYCRD | | | | |
| 2A3 | RFTVSRDNAKNTLYLQMN | 1587 | VNGDI | 1862 | WGQGTQVTVSS |
| | SLKPEDTATYLCRD | | | | |
| 27A5 | RFTVSRDNAKNTLYLQMN | 1588 | VNGDI | 1863 | WGQGTPVTVSS |
| | SLEPEDTATYYCWD | | | | |
| 2C5 | RFTVSRDNAKNTLYLRMN | 1589 | VNADI | 1864 | WGQGTQVTVSS |
| | SLKSEDSATYTCRA | | | | |
| 27G5 | RFTVSRDNAKNTVYLQMN | 1590 | VNGDY | 1865 | WGQGTQVTVSS |
| | SLKPEDTAVYYCRD | | | | |
| 13A9 | RFTVSRDNANHTVYLQMN | 1591 | VNGDY | 1866 | WGQGTQVTVSS |
| | SLKPEDTAVYYCRD | | | | |
| 29E9 | RFTVSRDNAKNTVYLQMN | 1592 | VNGDY | 1867 | WGQGTQVTVSS |
| | SLKPEDTAVYYCRD | | | | |
| 15D8 | RFTVSRDNAKNTVYLQMN | 1593 | VNGDY | 1868 | WGQGTQVTVSS |
| | SLKPEDTAVYYCRD | | | | |
| 15G4 | RFTVSRDNAKNTLYLQMN | 1594 | VNGDY | 1869 | WGQGTQVTVSS |
| | SLKPEDTAVYYCWD | | | | |
| 15D12 | RFAISRDNAKNTAYLQMN | 1595 | VWKLPRFV | 1870 | WGQGTQVTVSS |
| | SLKAEDTAVYYCNA | | DNDY | | |
| 15E12 | RFTMARDNANHTVHLQM | 1596 | NWKMLLGV | 1871 | WGQGTQVTVSS |
| | NSLKPEDTAVYYCNA | | ENDY | | |
| 13D7 | RFTMARDNANHTVHLQM | 1597 | NWKMLLGV | 1872 | WGQGTQVTVSS |
| | NSLKPEDTAVYYCNA | | ENDY | | |
| 13A8 | RFTISRDNAENTVYLQMN | 1598 | VNRDY | 1873 | WGQGTQVTVSS |
| | SLKPEDTAVYYCWD | | | | |
| 15A4 | RFTISRDNAKNTVYLQINS | 1599 | VNRDY | 1874 | WGQGTQVTVSS |
| | LKPEDTAVYYCWD | | | | |
| 17F7 | RFTISRDNAKKTMYLQMN | 1600 | VNRDY | 1875 | WGQGTQVTVSS |
| | SLKPDDTAVYYCRD | | | | |
| 15C8 | RFTVSRDNAENTVYLQMN | 1601 | VNRDY | 1876 | WGQGTQVTVSS |
| | SLKPEDTAVYYCRD | | | | |
| 17A10 | RFTLSRDNAKNTVYLQMN | 1602 | VNRDY | 1877 | WGQGTQVTVSS |
| | SLKPEDTAVYYCRD | | | | |
| 27D3 | RFTISRDNAENTVYLQMN | 1603 | VNRDY | 1878 | WGQGTQVTVSS |
| | SLKPEDTAVYYCWD | | | | |
| 13B12 | RFTLSRHNAENTVYLQMN | 1604 | VNRDY | 1879 | WGQGTQVTVSS |
| | SLKPEDTAVYYCRD | | | | |
| 15B2 | RFTISSDNAKSTIYLQMNS | 1605 | VNRDY | 1880 | WGQGTQVTVSS |
| | LKPDDTAVYYCRD | | | | |
| 15B11 | RFTISSDNAKNTIYLQMNS | 1606 | VNRDY | 1881 | WGQGTQVTVSS |
| | LKPDDTAVYYCRD | | | | |
| 13C9 | RFTISRDNAKKTVYLQMNS | 1607 | VNRDY | 1882 | WGQGTQVTVSS |
| | LKPEDTAVYYCRD | | | | |
| 17D5 | RFTISRDGATNTVFLQMN | 1608 | VNRDY | 1883 | WGQGTQVTVSS |
| | NLKPEDTAVYYCRD | | | | |
| 27B5 | RFTVSRDNAENTVYLQMN | 1609 | VNRDY | 1884 | WGQGTQVTVSS |
| | SLKPEDTAVYYCRD | | | | |
| 27C7 | RFTVSRDNADNTVYLQMN | 1610 | VNRDY | 1885 | WGQGTQVTVSS |
| | SLKPEDTAVYYCRD | | | | |
| 13D4 | RFTISSDNAKSTIYLQMNS | 1611 | VNREY | 1886 | WGQGTQVTVSS |
| | LEPDDTAVYYCRD | | | | |
| 15G5 | RFTISSDNAKKTIYLQMNS | 1612 | VNREY | 1887 | WGQGTQVTVSS |
| | LKPDDTAVYYCRD | | | | |
| 13C4 | RFTISSDNAKSTIYLQMNS | 1613 | VNREY | 1888 | WGQGTQVTVSS |
| | LKPDDTAVYYCRD | | | | |
| 46G1 | RFTISRDNAKNAVILQMNN | 1614 | KPGWVARD | 1889 | WGQGTQVTVSS |
| | LKTEDTAVYYCAA | | PSQYNY | | |
| 46E4 | RFTISRDNAKNAVILQMNN | 1615 | KPGWVARD | 1890 | WGQGTQVTVSS |
| | LKTEDTAVYYCAA | | PSEYNY | | |
| 17B5 | RFTISNDNAKDTVYLQMN | 1616 | FNRDL | 1891 | WGQGTQVTVSS |
| | SLKSEDTAVYYCRN | | | | |
| 15C9 | RFTISRDNAKNTVYLQMN | 1617 | VNRDL | 1892 | WGQGTQVTVSS |
| | SLKPEDTGVYYCRD | | | | |
| 13D10 | RFTISKDYTRNTVYLQVNS | 1618 | DANPNCGL | 1893 | WGQGTQVTVSS |
| | LKPEDTAVYHCAT | | NVWNS | | |
| 17C6 | RFTISGDTAKSTLYLQMNS | 1619 | RDYYYMPF | 1894 | WGQGTQVTVSS |
| | LKPEDTAMYYCYG | | | | |
| 15A2 | RFAISRDNAKNTVYLQMN | 1620 | INEDQ | 1895 | WGQGTQVTVSS |
| | SLKPEDTAVYYCRD | | | | |
| 17A8 | RFAISRDNAKNMVYLQMN | 1621 | INEDQ | 1896 | WGQGTQVTVSS |
| | TLKPEDTAVYYCRD | | | | |
| 15G10 | RFAISRDNAKNTVYLQMN | 1622 | INEDQ | 1897 | WGQGTQVTVSS |
| | SLKPEDTAVYYCRD | | | | |
| 27A3 | RFAISRDNAKNTVYLQMN | 1623 | INEDQ | 1898 | WGQGTQVTVSS |
| | TLKPEDTAVYYCRD | | | | |
| 17H10 | RFAISRDNAKNTVYLQMR | 1624 | INADQ | 1899 | WGQGTQVTVSS |
| | SLKPEDTAVYYCRD | | | | |
| 30D10 | RFTISRDNAKNTVYLQMN | 1625 | INRDI | 1900 | WGQGSQVTVSS |
| | SLKPEDTAVYYCRD | | | | |
| 15H4 | RFTISRDNAKNTVYLQMN | 1626 | INHDI | 1901 | WGRGSQVTVSS |
| | NLKPEDTAVYYCRD | | | | |
| 17B7 | RFTISRDNAKKTVYLQMNS | 1627 | INRDY | 1902 | WGQGTQVTVSS |
| | LKPEDTAVYFCRD | | | | |
| 15D2 | RFTFSKDGAKNTVYLQMN | 1628 | INRDY | 1903 | WGQGTQVTVSS |
| | SLKPEDTAVYYCRD | | | | |
| 17G5 | RFTISRDNAKNTVYLQMN | 1629 | INRDY | 1904 | WGQGTQVTVSS |
| | SLKPEDTAVYYCRD | | | | |
| 15B6 | RFTLSRDNAKKTVYLQMN | 1630 | INGDY | 1905 | WGQGTQVTVSS |
| | SLKPEDTAIYYCRD | | | | |
| 27F2 | RFTISISRDNVEYTVDLQM | 1631 | INGDY | 1906 | WGQGTQVTVSS |
| | DSLKPEDTAVYYCRD | | | | |
| 17F5 | RFTISRDNAKNTVYLQVNS | 1632 | TNGDY | 1907 | WGQGTQVTVSS |
| | LKPEDTAVYYCWD | | | | |
| 17B2 | RFTISRDNAKNTLYLQMNS | 1633 | DISTFGWGP | 1908 | WGQGTQVTVSS |
| | LKPEDTALYYCTK | | FDY | | |
| 27H4 | RFTISRDNAKNTVYLEMNS | 1634 | RWDIVGAIW | 1909 | WGQGTQVTVSS |
| | LKPEDTGVYYCNG | | | | |
| 13A4 | RFTISRDNAKNTVYLEMNS | 1635 | RWDIVGAIW | 1910 | WGQGTQVTVSS |
| | LKPEDTGVYYCNG | | | | |
| 2A1 | RFTISRDNTKNTLDLQMNS | 1636 | RWLEIGAEY | 1911 | WGQGTQVTVSS |
| | LKPEDTAVYYCHG | | | | |
| 15E10 | RFTISRDNAKNTVVLQMN | 1637 | SWSYPGLTY | 1912 | WGKGTLVTVSS |
| | GLKPEDTAVYYCKG | | | | |
| 27E7 | RFTISRDNAKNTVYLQMN | 1638 | VWRAIGRTY | 1913 | WGQGTQVTVSS |
| | DLKPEDTAVYYCNG | | | | |
| 47E5 | RFTIARDNAKNTVSLQMN | 1639 | DRRSYNGR | 1914 | WGQGTQVTVSS |
| | SLKPEDTAVYYCNL | | QY | | |
| 2G4 | RFTISRDNTKNTMYLQMV | 1640 | GGREYSGV | 1915 | WGQGTQVTVSS |
| | SLKPEDTAVYYCNV | | YYYREY | | |
| 14D4 | RFTISRDNAKNTVYLQMAS | 1641 | RPSDTTWS | 1916 | WGQGTQVTVSS |
| | LKPEDTAAYYCAA | | ESSAS | | |
| 17A5 | RFTISRDNVKNTLYLQMNS | 1642 | DLGNSGRG | 1917 | WGQGTQVTVSS |
| | LKSEDTAVYYCAK | | PYTN | | |
| 15D10 | RFTISRDNAKNTVYLQMN | 1643 | DCGVPGFG | 1918 | WGQGTQVTVSS |
| | SLKPEDTAVYYCAT | | WTFSS | | |
| 13C2 | RFTISRDNAKNAVHLQMN | 1644 | KQLPYLQNF | 1919 | WGQGTQVTVSS |
| | SLRLEDTAVYYCNA | | | | |
| 17G11 | RFTISRDNPETAVHLQMN | 1645 | KQLPYLQNF | 1920 | WGQGTQVTVSS |
| | SLKLEDTAVYYCNA | | | | |
| 17A3 | RFTISRDNARDTLFLQMHA | 1646 | HRWGLNY | 1921 | WGQGTQVTVSS |
| | LQPEDTAVYMCNL | | | | |
| 27B7 | RFTISRDNAKNTLYLQMSS | 1647 | ARSSSSYYD | 1922 | WGQGTQVTVSS |
| | LKPEDTALYYCAK | | FGS | | |
| 17A6 | RFTISTDNAKNTLYLQMSS | 1648 | ARSSSSYYD | 1923 | WGQGTQVTVSS |
| | LKPEDTALYYCAK | | FGS | | |
| 17D7 | RFTISRDNAKNTVYLQMN | 1649 | DRGSGTCY | 1924 | WGQGTQVTVSS |
| | SLKPEDTAVYYCAT | | ADFGS | | |
| 46D4 | RFTISRDNAKKTLYLQMNS | 1650 | GWGPAVTSI | 1925 | ATLGTQVTVSS |
| | LQSEDTAVYYCAK | | PV | | |
| 27B3 | RFTISRDNAKNTVYLQMN | 1651 | INRDI | 1926 | WGQGSQVTVSS |
| | SLKPEDTAVYYCRD | | | | |
| 27E5 | RFTISRDNAKNTVYLQMN | 1652 | INRDI | 1927 | WGQGSQVTVSS |
| | SLKPEDTAVYYCRD | | | | |
| 27D6 | RFTISRDNAKNTVYLQMN | 1653 | INRDI | 1928 | WGQGSQVTVSS |
| | SLKPEDTAVYYCRD | | | | |
| 30D10 | RFTISRDNAKNTVYLQMN | 1654 | INRDI | 1929 | WGQGSQVTVSS |
| | SLKPEDTAVYYCRD | | | | |
| 47G11 | RFTISRDNAKNTVYLQMN | 1655 | SRDYSRSR | 1930 | WGQGTQVTVSS |
| | SLKPEDTAVYYCAS | | DPTSYDR | | |
| 27C3 | RFTISRDNAKNTLYLQMNS | 1656 | PRGSSLYLL | 1931 | WGQGTQVTVSS |
| | LKPEDTAVYYCAR | | EYDY | | |
| 11A101/1- | RFTTSRDNAKNTVYLQMN | 1657 | DFYLATLAH | 1932 | WGQGTQVTVSS |
| 120 | DLKPEDTAVYYCAA | | EYDY | | |
| 11A22/1- | RFTISRDNAKNTVYLQMN | 1658 | DFYVSTLAH | 1933 | WGQGTQVTVSS |
| 122 | SLKPEDTAVYYCAA | | EYDY | | |
| 12D44/1- | RFTISRANAKNTVYLQMN | 1659 | DFYVSTLAH | 1934 | WGQGTQVTVSS |
| 122 | GLKPEDTAVYYCAA | | EYDY | | |
| 12E11/1- | RFTISRDNAKITVYLQMNS | 1660 | DFYVSTLAH | 1935 | WGQGTQVTVSS |
| 122 | LKPEDTAVYYCAA | | EYDY | | |
| 13G111/ | RFTISRDNAKNTVYLQMN | 1661 | DTFTLSTLS | 1936 | WGQGTQVTVSS |
| 1-123 | SLKPEDTAVYYCAA | | HEYDY | | |
| 13F71/1- | RFTISRDNAKNTVYLQMN | 1662 | DLIVATLPGE | 1937 | WGQGTQVTVSS |
| 123 | SLKPEDTAVYYCAA | | YDY | | |
| 14H61/1- | RFTISRDNAKNTVYLQMN | 1663 | DEILATLPHE | 1938 | WGQGTQVTVSS |
| 122 | SLSPEDTAVYYCAA | | YDY | | |
| 22B12/1- | RFTISRDNAKNTVYLQMN | 1664 | DAYTVIATLP | 1939 | WGQGTQVTVSS |
| 124 | SLKPEDTAVYYCAA | | HEYDY | | |
| 14H71/1- | RFTISRDSAKNAVNLQMEL | 1665 | KHSTVAGLT | 1940 | WGQGTQVIVSS |
| 123 | VESDDTAVYYCAA | | HEYDY | | |
| 12D51/1- | RFTISRDSAKNTVYLQMDS | 1666 | VYVSTWGN | 1941 | WGQGTQVTVSS |
| 120 | LKPEDTAVYVCNA | | GYDY | | |
| 11A111/1- | RFTISRDNAKNSVYLQMN | 1667 | RRSGYYSLS | 1942 | WGQGTQVTVSS |
| 126 | SLKPEDTAIYYCAA | | TSPHQYAY | | |
| 13G71/1- | RFTISRDNAKNTVYLQMN | 1668 | RVNYAAYSR | 1943 | WGQGTQVTVSS |
| 124 | SLKPEDTAVYYCGA | | LEHDYHY | | |
| 13G74/1- | RFTISRDNAKNTVYLQMN | 1669 | RVNYAAYSR | 1944 | WGQGTQVTVSS |
| 125 | SLKPEDTAVYYCGA | | LEHDYHY | | |
| 11A71A/ | RFTIARDDAKNTMYLQMN | 1670 | NRAGIYEY | 1945 | WGQGTQVTVSS |
| 1-116 | GMKPEDTAVYYCKM | | | | |
| 22B101/1- | RFDISRDNAKNTVYLQMN | 1671 | RLFMATPNQ | 1946 | WGQGTQVTVSS |
| 123 | RLKPEDTAVYYCAA | | GQYYY | | |
| 11B42/1- | RFAISRDNALNTVYLQMNS | 1672 | RPSYSTNNV | 1947 | WGQGTQVTVSS |
| 123 | LKPEDTAVYYCAA | | KSYRY | | |
| 13E111/1- | RFTISRDNGKNTVDLRMN | 1673 | RPAVVHTRK | 1948 | WGQGTQVTVSS |
| 124 | SLKPEDTAVYYCAA | | ESYPY | | |
| 14H12/1- | RFTISRDNAKNTVYLQMN | 1674 | RINYSVLTTT | 1949 | WGQGTQVTVSS |
| 125 | SLKPEDTAVYYCAA | | SSSYHY | | |
| 13G101/ | RFTISRDDAKNTVYLQMN | 1675 | DFRSTWLSS | 1950 | WGQGTQVTVSS |
| 1-123 | SLKAEDTAIYYCAA | | SGSSYTY | | |
| 13G41/1- | RFTVSRDNAQNTVYLQMN | 1676 | RRIVNVEGA | 1951 | WGQGTQVTVSS |
| 121 | SLKIEDTGVYYCNA | | YRDY | | |
| 22B910/1- | RFTISGDDARNTVYLQMN | 1677 | KVVVAVEGA | 1952 | WGQGTQVTVSS |
| 121 | SLNPEDTAVYYCNA | | KYDY | | |
| 21A81/1- | RFTISRDNSENTVYFEMG | 1678 | CRISWCAGA | 1953 | WGQGTQVTVSS |
| 122 | SLKPEDTAVYYCAI | | ESDYGY | | |
| 21A92/1- | RFTISRDNAKGTVYLQMS | 1679 | DSITDRRSV | 1954 | WGQGTQVTVSS |
| 127 | SLKPEDTAVYYCAA | | AVAHTSYYY | | |
| 22C712/1- | RFTISRDNTKNTVYLQMNS | 1680 | RLSSVAVAS | 1955 | WGQGTQVTVSS |
| 123 | MRPEDTAVYYCAA | | TRYDY | | |
| 11A13/1- | RFTISRDIANDVVYLQMNS | 1681 | NRQSGVAS | 1956 | WGQGTQVTVSS |
| 125 | LEPEDTAVYYCAR | | ENLRLYTY | | |
| 13G93/1- | RFTISRDNAKNTLYLQTTS | 1682 | DKQSGVSV | 1957 | WGQGTQVTVSS |
| 123 | LRPEDTGVYYCAE | | NPKYAY | | |
| 12C52/1- | RFTISKDNAKNTVYLQMNS | 1683 | QTLGRSLYD | 1958 | WGQGTQVTVSS |
| 118 | LKPEDTAVYYCAA | | Y | | |
| 12C61/1- | RFTISRDNAKNTVYLQMN | 1684 | SRYSGGVA | 1959 | WGQGTQVTVSS |
| 126 | SLKPEDTAVYYCAA | | TARRSEYHY | | |
| 21A61/1- | RFTISRDYAKNTWYLQMN | 1685 | VATYSRNVG | 1960 | WGQGTQVTVSS |
| 125 | TLKPEDTAAYYCAA | | SVRNYDY | | |
| 11A121/1- | RFTISRDNAKNTVQLQMN | 1686 | SQPLNYYTY | 1961 | WGQGTQVTVSS |
| 126 | SLKPEDTAVYYCAV | | YDARRYDY | | |
| 11A91/1- | RFTISRDNAKNTVYLQMTS | 1687 | TPVYYQRYY | 1962 | WGQGTQVTVSS |
| 124 | LMPEDTAVYYCAD | | DQNAYDY | | |
| 13G72/1- | RFTISRDNAKNTVYLQMN | 1688 | KYYSYYAYD | 1963 | WGQGTQVTVSS |
| 118 | SLKPEDTAVYYCAA | | Y | | |
| 13E81/1- | RFTISRDNAKDTMYLQMN | 1689 | SPVYYIDYS | 1964 | WGQGTQVTVSS |
| 124 | VLKPEDTAVYYCAA | | SQYKYGY | | |
| 11B31/1- | RFTISRDNAKNTVYLRMNS | 1690 | QIYYRTNYY | 1965 | WGQGTQVTVSS |
| 124 | LKPEDTAVYYCAT | | SQNAYDY | | |
| 13G81/1- | RFTISRDDAKNTVYLQMN | 1691 | QIYYRTNYY | 1966 | WGQGTQVTVSS |
| 124 | SLKPEDTAVYLCAA | | SQNNYDY | | |
| 21A53/1- | RVTISRDDAKNTVYLRMN | 1692 | QIYYRTNYY | 1967 | WGQGTQVTVSS |
| 124 | SLKPEDTAVYYCAA | | SQNVYDY | | |
| 14H51/1- | RFTISRDDAKNTVYLRMNS | 1693 | QIYYRTNYY | 1968 | WGQGTQVTVSS |
| 124 | LKPEDTAVYYCAA | | SQNEYDY | | |
| 21A21/1- | RFTISRDNAKNTVYLRMNS | 1694 | QIYYRTNYS | 1969 | WGQGTQVTVSS |
| 124 | LKPEDTAVYYCAA | | SQSNYDY | | |
| 21A111/1- | RFTIARDDAKNTVYLQMN | 1695 | ATAYRTNYS | 1970 | WGQGTQVTVSS |
| 124 | SLKPEDTAVYYCAL | | SRDKYDY | | |
| 22B1212/ | RFTISRDNAKNTLYLQMNS | 1696 | YLSFYSDYE | 1971 | WGQGTQVTVSS |
| 1-122 | LKPEDTAVYYCAK | | VYDY | | |
| 11A31/1- | RFTISRDNAKNGVSLQMD | 1697 | DPTYGSGR | 1972 | WGQGTQVTVSS |
| 120 | SLKAEDTAVYYCAS | | WTY | | |
| 13E51/1- | RFTISSDNAKNTVYLQMNS | 1698 | SVTYYSGSH | 1973 | WGQGTQVTVSS |
| 128 | LKPEDTALYYCAR | | AYTQEGGY | | |
| | | | AR | | |
| 12D121/1- | RFTISRDDAKNTVYLQMN | 1699 | RQPYASGS | 1974 | WGQGTQVTVSS |
| 126 | SLKPEDTAVYYCAA | | HYSSTQYTY | | |
| 13F121/1- | RFTISIDNAKNTVYLQMNN | 1700 | LYRGRSVYD | 1975 | WGQGTQVTVSS |
| 119 | LTPEDTAVYYCAA | | D | | |
| 13G121/ | RFTISRDNAKNTVYLQMD | 1701 | SSYGSTYYS | 1976 | WGQGTQVTVSS |
| 1-127 | SLKPEDTAVYYCAA | | QGRAYYYD | | |
| | | | Y | | |
| 22B41/1- | RFTISKENAKNTVYLQMTIL | 1702 | SPYGPLYRS | 1977 | WGQGTQVTVSS |
| 124 | KPEDTAVYYCAS | | THYYDY | | |
| 12D71/1- | RFTISRDSAKDTVYLQMN | 1703 | TTYYSGSYI | 1978 | WGQGTQVTVSS |
| 125 | NLKPEDTAVYYCAA | | STLSTSYNY | | |
| 13F42/1- | RFTISRDNAKNAVNLQMS | 1704 | GSY | 1979 | RGQGTQVTVSS |
| 111 | NLKPEDTALHYCTI | | | | |
| 12C101/1- | RFTISRDNARNAVNPQMN | 1705 | GSY | 1980 | RGQGTQVTVSS |
| 111 | NLKPEDTAVYYCTI | | | | |
| 14H91/1- | RFTISRDNAKNAVYLQMN | 1706 | RDSSTLDST | 1981 | WGRGTQVTVSS |
| 127 | SLKPEDTAVYYCAA | | YYVGGSYN | | |
| | | | Y | | |
| 13F41/1- | RFTISRDNAKNAVNLQMS | 1707 | GSY | 1982 | RGQGTQVTVSS |
| 111 | NLKPEDTALYYCTI | | | | |
| 14H21/1- | RFTISRSIAENTVYLQMNK | 1708 | RMYGSDWL | 1983 | WGQGTQVTVSS |
| 125 | VKPEDTAVYYCAA | | PRPEDFDS | | |
| 22B610/1- | RFTISRDNAKNTVYLQMN | 1709 | DVSPSYGS | 1984 | WGQGTQVTVSS |
| 120 | SLKPEDTAVYYCNA | | RWYG | | |
| 12C32/1- | RFTISRDNAKSTMYLQMN | 1710 | RREYSTIYT | 1985 | WGQGTQVTVSS |
| 127 | SLKPEDTAVYYCAA | | ARYPGEYVY | | |
| 12D61/1- | RFTISRDNAKNTLYLQMNS | 1711 | RERGIYDS | 1986 | WGQGTQVTVSS |
| 116 | LKAEDTAVYYCNA | | | | |
| 13G31/1- | RFTISRDDAKNSIYLQMNT | 1712 | DDYLGGDN | 1987 | WGQGTQVTVSS |
| 125 | LKPEDTAVYYCAA | | WYLGPYDS | | |
| 22C65/1- | RFTISRDNAKNTVYLQMN | 1713 | RKTYRSLTY | 1988 | WGQGTQVTVSS |
| 124 | SLIPEDTAVYYCAA | | YGEYDS | | |
| 11A71/1- | RFTVSRDNGRNTVYLLQMN | 1714 | DRLLYYSSG | 1989 | WGQGTQVTVSS |
| 125 | SLKPEDTAVYYCNV | | YYQTSVDV | | |
| 11B91/1- | RFTISRDKAKNTVLLQMDS | 1715 | DRFLYYSAG | 1990 | WGQGTQVTVSS |
| 125 | LKPEDTAVYYCNA | | RYDTGSDI | | |
| 11A81/1- | RFTISRDKAKNALYLQMNS | 1716 | DRVLYYSDS | 1991 | WGQGTQVTVSS |
| 125 | LKPEDMAVYYCNA | | RYYTGSNY | | |
| 11B121/1- | RFTISRDNAKNTVYLEMNN | 1717 | DRALYRNYS | 1992 | WGQGTQVTVSS |
| 127 | LKPEDTAVYYCNA | | DGRYYTGY | | |
| | | | DY | | |
| 12D31/1- | RFTISRDNAENTVYLQMN | 1718 | RILSRNY | 1993 | WGQGNQVTVSS |
| 115 | NLKPEDMAVYYCNA | | | | |
| 11B51/1- | RFTISRDNAKSTVYLQMDS | 1719 | SRRFYSGLY | 1994 | WGQGTQVTVSS |
| 127 | LKPEDTAVYYCAA | | YYTDDAYEY | | |
| 13G51/1- | RFTISRDNSKNTVSLQMN | 1720 | SRRFYSGLV | 1995 | WGQGTQVTVSS |
| 127 | SLKPEDTAVYYCAA | | YYSVDAYEN | | |
| 13F82A/1- | RFTIFRDNAENTAYLQMNS | 1721 | TKRYYSIKY | 1996 | WGQGTQVTVSS |
| 130 | LNPEDTAVYYCAV | | YSTVEDYEY | | |
| 13E101/1- | RFTISRDNAESTVYLQMNS | 1722 | NRYYCSTY | 1997 | WGQGTQVTVSS |
| 128 | LKAEDTAVYYCAA | | GCLSTPRQY | | |
| | | | DY | | |
| 22B85/1- | RFAISRDGAKNTVYLQMD | 1723 | RVYTGTYG | 1998 | WGQGTQVTVSS |
| 120 | SLKPEDTAVYYCNL | | GRNY | | |
| 11B12/1- | RFAISRDNAKNTVYLQMH | 1724 | GYSLPAFDS | 1999 | WGPGTQVTVSS |
| 118 | SLKPEDTAVYHCAT | | | | |
| 13G61/1- | RFTISRDNADNTVTLQMN | 1725 | GIDLYTFHY | 2000 | FGQGTQVTVSS |
| 118 | SLKPEDTAVYYCAG | | | | |
| 14H41/1- | RFTISRDNADNTVTLQMN | 1726 | GIDLYTFDY | 2001 | FGQGTQVTVSS |
| 118 | SLKPEDTAVYYCAG | | | | |
| 11B81/1- | RFTISRDNAEDLLYLQMNL | 1727 | NSDSGFDS | 2002 | WGQGTQVTVSS |
| 126 | LKPEDTAVYYCAA | | YSVWAAYEY | | |
| 11C11/1- | RFTISKNTAENTVYLQMNS | 1728 | LLTVWDTYKY | 2003 | WGQGTQVTVSS |
| 121 | LKPEDTAVYYCAV | | | | |
| 12D92/1- | RFTISRANDNNPLYLQMNT | 1729 | TNRWYTGV | 2004 | WGQGTQVTVSS |
| 123 | LKPEDTAVYYCAA | | YDLPSRYEY | | |
| 13E61/1- | RFTISRDNAINSLYLQMDT | 1730 | TNRWFSAV | 2005 | WGQGTQVTVSS |
| 123 | LKPEDTAVYYCAA | | YDLPSRYTY | | |
| 22B71/1- | RFSISRDNALKTVYLQMNS | 1731 | DLPSRL | 2006 | WGQGTQVTVSS |
| 114 | LKPEDTAVYYCYA | | | | |
| 21A121/1- | RFTISRDYDNSPVYLQMN | 1732 | TSRWYSAV | 2007 | WGQGTQVTVSS |
| 123 | TLKPEDTAVYYCAA | | YDLPTRYDY | | |
| 13F101/1- | RFTISRDNAKNTVYLQMN | 1733 | DRSYSIDYR | 2008 | WGQGTQVTVSS |
| 124 | SLEREDTAVYYCAA | | HPDSYSY | | |
| 11A43/1- | RFTISRDNAKNTVTLQMNS | 1734 | DPLLFYGVG | 2009 | WGQGTQVTVSS |
| 123 | LRPEDTAVYYCAA | | SADVDY | | |
| 12C81/1- | RFTISRDNAKNSVYLQMN | 1735 | ISGLVQRDY | 2010 | WGQGTQVTVSS |
| 117 | SLKPEDTSVYYCNV | | | | |
| 11B21/1- | RFTISRDNARNIVYLQMN | 1736 | GGHLLGYD | 2011 | WGQGTQVTVSS |
| 124 | SLKPEDTAVYYCAA | | VQWEPDY | | |
| 11B71/1- | RFTISRDNAKNIVYLQMN | 1737 | HKRTYELGA | 2012 | WGQGTQVTVSS |
| 126 | SLKPEDTAVYYCAA | | HSTDFGS | | |
| 12C121/1- | RFTISRDNAKNAVYLQMN | 1738 | AVFVDSGDF | 2013 | WGQGTQVTVSS |
| 126 | SLKPEDTGVYYCAT | | SVCRGVGY | | |
| 22C51/1- | RFTISRDNAKNTVYLQMN | 1739 | LRSWPRGV | 2014 | WGQGTQVTVSS |
| 121 | SLKPEDTAVYYCAA | | DSGS | | |
| 12D11/1- | RFTISRDNTKNTIDLQINSL | 1740 | DVIYKNIGS | 2015 | WGQGTQVTVSS |
| 123 | KPEDTAVYYCAA | | GSFDY | | |
| 12D14/1- | RFTISRDNTKNTIDLQINSL | 1741 | DVIYKNIGS | 2016 | WGQGTQVTVSS |
| 123 | KPEDTAVYYCAA | | GSFDY | | |
| 12C111/1- | RFIVSRDNAKNTADLQMN | 1742 | SKWYGGFG | 2017 | WGQGTQVTVSS |
| 123 | DLKPEDTAVYYCGA | | DTDIEY | | |
| 22B55/1- | RFIVSRDNAKNTADLQMN | 1743 | SKWYGGFG | 2018 | WGQGTQVTVSS |
| 123 | ELKPEDTAVYYCGA | | DTDIEY | | |
| 14H121/1- | RFTISRDDAKNTVFLQMNS | 1744 | DGPFGN | 2019 | WGQGTQVTVSS |
| 113 | LKPEDTAVYYCNV | | | | |
| 12C71/1- | RFTISRENVKDTMYLQMN | 1745 | SRHSGNTLS | 2020 | WGQGTQVTVSS |
| 125 | SLQAEDTGVYYCVR | | FSLKYDY | | |
| 21A31/1- | RFTISRDNARNTAYLQMD | 1746 | RRWSGTLS | 2021 | WGQGTQVTVSS |
| 125 | SLRPEDTAVYSCAA | | LFDNEYYY | | |
| 12C91/1- | RFTISRGNAKNTVNLQMN | 1747 | DNYRDSYLE | 2022 | WGQGTQVTVSS |
| 121 | SLKPEDTAVYYCAA | | YDY | | |
| 14H81/1- | RFTISRDNTESTGYLQMN | 1748 | SWDHGDYV | 2023 | WGQGTQVTVSS |
| 125 | NLKPEDTAVYYCAA | | DGGFFYDY | | |
| 12C42/1- | RFTISRDNAKNMVYLQMN | 1749 | AGSAGPPSI | 2024 | WGQGTQVTVSS |
| 124 | SLKPEDTAVYYCAA | | DRQYDY | | |
| 12D102/1- | RFTISRDYAKNTAYLQMNS | 1750 | DVRDSIWRSY | 2025 | WGQGTQVTVSS |
| 118 | LKPEDTAVYYCVA | | | | |
| 11A52/1- | RFTISRDNAENTVYLQMN | 1751 | GWGATQAQ | 2026 | WGQGTQVTVSS |
| 120 | SLTPEDTAVYYCAS | | SGF | | |
| 14H111/1- | RFTISRDNAENTVYLLMNS | 1752 | GWGATQAQ | 2027 | WGQGTQVTVSS |
| 120 | LIPEDTAVYYCAT | | HGF | | |
| 11B61/1- | RFTIYRDNAQNTMYLQMN | 1753 | SSSLATISQ | 2028 | WGQGTQVTVSS |
| 120 | SLKPEDTAVYYCAA | | PSS | | |
| 12E42/1- | RFTVSRDNAKNTVYLQMN | 1754 | KAVTSRDHEY | 2029 | WGQGTQVTVSS |
| 118 | SLKPEDTAVYYCNA | | | | |
| 13F81A/1- | RSTISRENAENTVYLQMN | 1755 | NSDEFYSGT | 2030 | WGQGTQVTVSS |
| 128 | SLKPEDTAVYYCAA | | LKLQSRMVEY | | |
| 11B102/1- | RFTISRDNAKKTAYLLIMNS | 1756 | GWKTDEYVK | 2031 | WGQGTQVTVSS |
| 118 | LRPEDTAVYYCVG | | | | |
| 21A41/1- | RFTISRDNTKNTVYLQMNS | 1757 | GWVTPSYE | 2032 | WGQGTQVTVSS |
| 120 | LKPEDTAVYYCRP | | YGN | | |
| 14H101/1- | RFTISRDNAKNTVDLQMS | 1758 | DQKYGMSY | 2033 | WGQGTQVTVSS |
| 128 | SLKPEDTAAYYCAA | | SRLWLVSEY | | |
| | | | EY | | |
| 12E21/1- | RFTISRDNAENLVYLQMN | 1759 | GWGDSAY | 2034 | WGQGTQVTVSS |
| 115 | NLKPEDTAVYYCSA | | | | |
| 13F21/1- | RFTISRDAAANLVYLQMNS | 1760 | NGIESYGW | 2035 | WTVGTQVTVSS |
| 123 | LKPSDTAIYSCNA | | GNRHFNY | | |
| 12E33/1- | RFIISRDNAKNTVYLQINSL | 1761 | GGWGTGRY | 2036 | WGVGTQVTVSS |
| 119 | KPEDTAVYYCAA | | NY | | |
| 13G11/1- | RFTISRDNAKNTVYLQMN | 1762 | GWGTAPLS | 2037 | WGQGTQVTVSS |
| 122 | NLKSEDTAVYYCAP | | TSVY | | |
| 118N121_A6_2_OK/ | RFTFSRDNAKNTVYLQMN | 1763 | DRFNTIANL | 2038 | WGQGTQVTVSS |
| 1-123 | SLKPEDTAIYLCAV | | PGEYDY | | |
| 118N121_B8_1_OK/ | RFTISRDNAKNTVYLQMN | 1764 | ETFNSISNLP | 2039 | WGQGTQVTVSS |
| 1-135 | SLKPEDTAVYYCAC | | GEYDY | | |
| 118N121_A2_2_OK/ | RFTIYRDNAKNWYLQMS | 1765 | DHFTFMSNL | 2040 | WGQGTQVTVSS |
| 1-124 | VLNGEDTAVYYCAA | | PSEYDY | | |
| 118N121_A8_2_OK/ | RFTISRDNAKNTVYLQMN | 1766 | RKIYRSLSY | 2041 | WGQGTQVTVSS |
| 1-124 | SLKPEDTAVYYCAA | | YGDYDS | | |
| 118N121_B3_1_OK/ | RFTISRDEAKNTVYLEMNS | 1767 | RLTMATPNQ | 2042 | WGQGTQVTVSS |
| 1-123 | LKTDDTAVYYCAA | | SQYYY | | |
| 118N121_A5_2_OK/ | RFTISRDNAKTIVYLQMNS | 1768 | SGIGTDN | 2043 | WGQGIEVTVSS |
| 1-114 | LQPEDTARYYCRY | | | | |
| 118N121_A9_2_OK/ | RFTISRDNAKTTVYLQMNS | 1769 | SGIGTDN | 2044 | WGQGIEVTVSS |
| 1-114 | LQPEDTARYYCRY | | | | |
| 118N121_A7_1_OK/ | RFTISRDNAKNTVYLQMN | 1770 | DILYKTDIYY | 2045 | WGQGTQVTVSS |
| 1-122 | SLKPEDTAVYYCYA | | RNDF | | |
| 118N121_A10_1_OK/ | RLPISSDNAKKTVYLQMDS | 1771 | LPYTICPVVV | 2046 | WGKGTQVTVSS |
| 1-131 | LKPEDTAVYYCAA | | KKGAVYYG | | |
| | | | VDDY | | |
| 118N121_A11_1_OK/ | RFTISRDNDENMLYLQMN | 1772 | GFSDRSFAV | 2047 | KGQGTQVTVSS |
| 1-120 | SLKPEDTAVYYCAT | | TH | | |
| 118N121_B7_4_OK/ | RFTISRDNAKNTVFLQMNS | 1773 | DFRLARLRV | 2048 | WGQGTQVTVSS |
| 1-124 | LKPEDTAIYYCAA | | ADDYDY | | |
| 118N121_B2_1_OK/ | RFATSSDSAKNTVYLQMH | 1774 | LRTDYSINW | 2049 | WGQGTQVTVSS |
| 1-130 | SLKPEDTAVYYCAT | | ANCQRDSL | | |
| | | | YGY | | |
| 118N121_B7_1_OK/ | RFIISRDDSKNTVDLQMNS | 1775 | GGWTRTHP | 2050 | WGQGTQVTVSS |
| 1-119 | LKPEDTAVYYCNL | | FDY | | |

[0493] Thus, in the Nanobodies of the invention, at least one of the CDR1, CDR2 and CDR3 sequences present is suitably chosen from the group consisting of the CDR1, CDR2 and CDR3 sequences, respectively, listed in Table A-1; or from the group of CDR 1, CDR2 and CDR3 sequences, respectively, that have at least 80%, preferably at least 90%, more preferably at least 95%, even more preferably at least 99% “sequence identity” (as defined herein) with at least one of the CDR1, CDR2 and CDR3 sequences, respectively, listed in Table A-1; and/or from the group consisting of the CDR1, CDR2 and CDR3 sequences, respectively, that have 3, 2 or only 1 “amino acid difference(s)” (as defined herein) with at least one of the CDR1, CDR2 and CDR3 sequences, respectively, listed in Table A-1.

[0494] In this context, by “suitably chosen” is meant that, as applicable, a CDR1 sequence is chosen from suitable CDR1 sequences (i.e. as defined herein), a CDR2 sequence is chosen from suitable CDR2 sequences (i.e. as defined herein), and a CDR3 sequence is chosen from suitable CDR3 sequence (i.e. as defined herein), respectively. More in particular, the CDR sequences are preferably chosen such that the Nanobodies of the invention bind to HER2 with an affinity (suitably measured and/or expressed as a K_{D}-value (actual or apparent), a K_{A}-value (actual or apparent), a kₒₙ-rate and/or a k_{off}-rate, or alternatively as an IC₅₀ value, as further described herein) that is as defined herein.

[0495] In particular, in the Nanobodies of the invention, at least the CDR3 sequence present is suitably chosen from the group consisting of the CDR3 sequences listed in Table A-1 or from the group of CDR3 sequences that have at least 80%, preferably at least 90%, more preferably at least 95%, even more preferably at least 99% sequence identity with at least one of the CDR3 sequences listed in Table A-1; and/or from the group consisting of the CDR3 sequences that have 3, 2 or only 1 amino acid difference(s) with at least one of the CDR3 sequences listed in Table A-1.

[0496] Preferably, in the Nanobodies of the invention, at least two of the CDR1, CDR2 and CDR3 sequences present are suitably chosen from the group consisting of the CDR1, CDR2 and CDR3 sequences, respectively, listed in Table A-1 or from the group consisting of CDR1, CDR2 and CDR3 sequences, respectively, that have at least 80%, preferably at least 90%, more preferably at least 95%, even more preferably at least 99% sequence identity with at least one of the CDR1, CDR2 and CDR3 sequences, respectively, listed in Table A-1; and/or from the group consisting of the CDR1, CDR2 and CDR3 sequences, respectively, that have 3, 2 or only 1 “amino acid difference(s)” with at least one of the CDR1, CDR2 and CDR3 sequences, respectively, listed in Table A-1.

[0497] In particular, in the Nanobodies of the invention, at least the CDR3 sequence present is suitably chosen from the group consisting of the CDR3 sequences listed in Table A-1 or from the group of CDR3 sequences that have at least 80%, preferably at least 90%, more preferably at least 95%, even more preferably at least 99% sequence identity with at least one of the CDR3 sequences listed in Table A-1, respectively; and at least one of the CDR1 and CDR2 sequences present is suitably chosen from the group consisting of the CDR1 and CDR2 sequences, respectively, listed in Table A-1 or from the group of CDR1 and CDR2 sequences, respectively, that have at least 80%, preferably at least 90%, more preferably at least 95%, even more preferably at least 99% sequence identity with at least one of the CDR1 and CDR2 sequences, respectively, listed in Table A-1; and/or from the group consisting of the CDR1 and CDR2 sequences, respectively, that have 3, 2 or only 1 amino acid difference(s) with at least one of the CDR1 and CDR2 sequences, respectively, listed in Table A-1.

[0498] Most preferably, in the Nanobodies of the invention, all three CDR1, CDR2 and CDR3 sequences present are suitably chosen from the group consisting of the CDR1, CDR2 and CDR3 sequences, respectively, listed in Table A-1 or from the group of CDR1, CDR2 and CDR3 sequences, respectively, that have at least 80%, preferably at least 90%, more preferably at least 95%, even more preferably at least 99% sequence identity with at least one of the CDR1, CDR2 and CDR3 sequences, respectively, listed in Table A-1; and/or from the group consisting of the CDR1, CDR2 and CDR3 sequences, respectively, that have 3, 2 or only 1 amino acid difference(s) with at least one of the CDR1, CDR2 and CDR3 sequences, respectively, listed in Table A-1.

[0499] Even more preferably, in the Nanobodies of the invention, at least one of the CDR1, CDR2 and CDR3 sequences present is suitably chosen from the group consisting of the CDR1, CDR2 and CDR3 sequences, respectively, listed in Table A-1. Preferably, in this aspect, at least one or preferably both of the other two CDR sequences present are suitably chosen from CDR sequences that have at least 80%, preferably at least 90%, more preferably at least 95%, even more preferably at least 99% sequence identity with at least one of the corresponding CDR sequences, respectively, listed in Table A-1; and/or from the group consisting of the CDR sequences that have 3, 2 or only 1 amino acid difference(s) with at least one of the corresponding sequences, respectively, listed in Table A-1.

[0500] In particular, in the Nanobodies of the invention, at least the CDR3 sequence present is suitably chosen from the group consisting of the CDR3 listed in Table A-1. Preferably, in this aspect, at least one and preferably both of the CDR1 and CDR2 sequences present are suitably chosen from the groups of CDR1 and CDR2 sequences, respectively, that have at least 80%, preferably at least 90%, more preferably at least 95%, even more preferably at least 99% sequence identity with the CDR1 and CDR2 sequences, respectively, listed in Table A-1; and/or from the group consisting of the CDR1 and CDR2 sequences, respectively, that have 3, 2 or only 1 amino acid difference(s) with at least one of the CDR1 and CDR2 sequences, respectively, listed in Table A-1.

[0501] Even more preferably, in the Nanobodies of the invention, at least two of the CDR1, CDR2 and CDR3 sequences present are suitably chosen from the group consisting of the CDR1, CDR2 and CDR3 sequences, respectively, listed in Table A-1. Preferably, in this aspect, the remaining CDR sequence present is suitably chosen from the group of CDR sequences that have at least 80%, preferably at least 90%, more preferably at least 95%, even more preferably at least 99% sequence identity with at least one of the corresponding CDR sequences listed in Table A-1; and/or from the group consisting of CDR sequences that have 3, 2 or only 1 amino acid difference(s) with at least one of the corresponding sequences listed in Table A-1.

[0502] In particular, in the Nanobodies of the invention, at least the CDR3 sequence is suitably chosen from the group consisting of the CDR3 sequences listed in Table A-1, and either the CDR1 sequence or the CDR2 sequence is suitably chosen from the group consisting of the CDR1 and CDR2 sequences, respectively, listed in Table A-1. Preferably, in this aspect, the remaining CDR sequence present is suitably chosen from the group of CDR sequences that have at least 80%, preferably at least 90%, more preferably at least 95%, even more preferably at least 99% sequence identity with at least one of the corresponding CDR sequences listed in Table A-1; and/or from the group consisting of CDR sequences that have 3, 2 or only 1 amino acid difference(s) with the corresponding CDR sequences listed in Table A-1.

[0503] Even more preferably, in the Nanobodies of the invention, all three CDR1, CDR2 and CDR3 sequences present are suitably chosen from the group consisting of the CDR1, CDR2 and CDR3 sequences, respectively, listed in Table A-1.

[0504] Also, generally, the combinations of CDR's listed in Table A-1 (i.e. those mentioned on the same line in Table A-1) are preferred. Thus, it is generally preferred that, when a CDR in a Nanobody of the invention is a CDR sequence mentioned in Table A-1 or is suitably chosen from the group of CDR sequences that have at least 80%, preferably at least 90%, more preferably at least 95%, even more preferably at least 99% sequence identity with a CDR sequence listed in Table A-1; and/or from the group consisting of CDR sequences that have 3, 2 or only 1 amino acid difference(s) with a CDR sequence listed in Table A-1, that at least one and preferably both of the other CDR's are suitably chosen from the CDR sequences that belong to the same combination in Table A-1 (i.e. mentioned on the same line in Table A-1) or are suitably chosen from the group of CDR sequences that have at least 80%, preferably at least 90%, more preferably at least 95%, even more preferably at least 99% sequence identity with the CDR sequence(s) belonging to the same combination and/or from the group consisting of CDR sequences that have 3, 2 or only 1 amino acid difference(s) with the CDR sequence(s) belonging to the same combination. The other preferences indicated in the above paragraphs also apply to the combinations of CDR's mentioned in Table A-1.

[0505] Thus, by means of non-limiting examples, a Nanobody of the invention can for example comprise a CDR1 sequence that has more than 80% sequence identity with one of the CDR1 sequences mentioned in Table A-1, a CDR2 sequence that has 3, 2 or 1 amino acid difference with one of the CDR2 sequences mentioned in Table A-1 (but belonging to a different combination), and a CDR3 sequence.

[0506] Some preferred Nanobodies of the invention may for example comprise: (1) a CDR1 sequence that has more than 80% sequence identity with one of the CDR1 sequences mentioned in Table A-1; a CDR2 sequence that has 3, 2 or 1 amino acid difference with one of the CDR2 sequences mentioned in Table A-1 (but belonging to a different combination); and a CDR3 sequence that has more than 80% sequence identity with one of the CDR3 sequences mentioned in Table A-1 (but belonging to a different combination); or (2) a CDR1 sequence that has more than 80% sequence identity with one of the CDR1 sequences mentioned in Table A-1; a CDR2 sequence, and one of the CDR3 sequences listed in Table A-1; or (3) a CDR1 sequence; a CDR2 sequence that has more than 80% sequence identity with one of the CDR2 sequence listed in Table A-1; and a CDR3 sequence that has 3, 2 or 1 amino acid differences with the CDR3 sequence mentioned in Table A-1 that belongs to the same combination as the CDR2 sequence.

[0507] Some particularly preferred Nanobodies of the invention may for example comprise: (1) a CDR1 sequence that has more than 80% sequence identity with one of the CDR1 sequences mentioned in Table A-1; a CDR2 sequence that has 3, 2 or 1 amino acid difference with the CDR2 sequence mentioned in Table A-1 that belongs to the same combination; and a CDR3 sequence that has more than 80% sequence identity with the CDR3 sequence mentioned in Table A-1 that belongs to the same combination; (2) a CDR1 sequence; a CDR 2 listed in Table A-1 and a CDR3 sequence listed in Table A-1 (in which the CDR2 sequence and CDR3 sequence may belong to different combinations).

[0508] Some even more preferred Nanobodies of the invention may for example comprise: (1) a CDR1 sequence that has more than 80% sequence identity with one of the CDR1 sequences mentioned in Table A-1; the CDR2 sequence listed in Table A-1 that belongs to the same combination; and a CDR3 sequence mentioned in Table A-1 that belongs to a different combination; or (2) a CDR1 sequence mentioned in Table A-1; a CDR2 sequence that has 3, 2 or 1 amino acid differences with the CDR2 sequence mentioned in Table A-1 that belongs to the same combination; and a CDR3 sequence that has more than 80% sequence identity with the CDR3 sequence listed in Table A-1 that belongs to the same or a different combination.

[0509] Particularly preferred Nanobodies of the invention may for example comprise a CDR1 sequence mentioned in Table A-1, a CDR2 sequence that has more than 80% sequence identity with the CDR2 sequence mentioned in Table A-1 that belongs to the same combination; and the CDR3 sequence mentioned in Table A-1 that belongs to the same combination.

[0510] In the most preferred Nanobodies of the invention, the CDR1, CDR2 and CDR3 sequences present are suitably chosen from one of the combinations of CDR1, CDR2 and CDR3 sequences, respectively, listed in Table A-1.

[0511] According to another preferred, but non-limiting aspect of the invention (a) CDR1 has a length of between 1 and 12 amino acid residues, and usually between 2 and 9 amino acid residues, such as 5, 6 or 7 amino acid residues; and/or (b) CDR2 has a length of between 13 and 24 amino acid residues, and usually between 15 and 21 amino acid residues, such as 16 and 17 amino acid residues: and/or (c) CDR3 has a length of between 2 and 35 amino acid residues, and usually between 3 and 30 amino acid residues, such as between 6 and 23 amino acid residues.

[0512] In another preferred, but non-limiting aspect, the invention relates to a Nanobody in which the CDR sequences (as defined herein) have more than 80%, preferably more than 90%, more preferably more than 95%, such as 99% or more sequence identity (as defined herein) with the CDR sequences of at least one of the amino acid sequences of SEQ ID NO's: 2051-2325.

[0513] Generally, Nanobodies with the above CDR sequences may be as further described herein, and preferably have framework sequences that are also as further described herein. Thus, for example and as mentioned herein, such Nanobodies may be naturally occurring Nanobodies (from any suitable species), naturally occurring V_{HH} sequences (i.e. from a suitable species of Camelid) or synthetic or semi-synthetic amino acid sequences or Nanobodies, including but not limited to partially humanized Nanobodies or V₁ sequences, fully humanized Nanobodies or V_{HH} sequences, camelized heavy chain variable domain sequences, as well as Nanobodies that have been obtained by the techniques mentioned herein.

[0514] Thus, in one specific, but non-limiting aspect, the invention relates to a humanized Nanobody, which consists of 4 framework regions (FR1 to FR4 respectively) and 3 complementarity determining regions (CDR) to CDR3 respectively), in which CDR1 to CDR3 are as defined herein and in which said humanized Nanobody comprises at least one humanizing substitution (as defined herein), and in particular at least one humanizing substitution in at least one of its framework sequences (as defined herein).

[0515] In another preferred, but non-limiting aspect, the invention relates to a Nanobody in which the CDR sequences have at least 70% amino acid identity, preferably at least 80% amino acid identity, more preferably at least 90% amino acid identity, such as 95% amino acid identity or more or even essentially 100% amino acid identity with the CDR sequences of at least one of the amino acid sequences of SEQ ID NO's: 2051-2325. This degree of amino acid identity can for example be determined by determining the degree of amino acid identity (in a manner described herein) between said Nanobody and one or more of the sequences of SEQ ID NO's: 2051-2325, in which the amino acid residues that form the framework regions are disregarded. Such Nanobodies can be as further described herein.

[0516] In another preferred, but non-limiting aspect, the invention relates to a Nanobody with an amino acid sequence that is chosen from the group consisting of SEQ ID NO's: 2051-2325 or from the group consisting of from amino acid sequences that have more than 80%, preferably more than 90%, more preferably more than 95%, such as 99% or more sequence identity (as defined herein) with at least one of the amino acid sequences of SEQ ID NO's: 2051-2325.

[0517] Another preferred, but non-limiting aspect of the invention relates to humanized variants of the Nanobodies of SEQ ID NO's: 2051-2325, that comprise, compared to the corresponding native V_{HH} sequence, at least one humanizing substitution (as defined herein), and in particular at least one humanizing substitution in at least one of its framework sequences (as defined herein).

[0518] The polypeptides of the invention comprise or essentially consist of at least one Nanobody of the invention. Some preferred, but non-limiting examples of polypeptides of the invention are given in SEQ ID NO's: 2051-2390.

[0519] It will be clear to the skilled person that the Nanobodies that are mentioned herein as “preferred” (or “more preferred”, “even more preferred”, etc.) are also preferred (or more preferred, or even more preferred, etc.) for use in the polypeptides described herein. Thus, polypeptides that comprise or essentially consist of one or more “preferred” Nanobodies of the invention will generally be preferred, and polypeptides that comprise or essentially consist of one or more “more preferred” Nanobodies of the invention will generally be more preferred, etc.

[0520] Generally, proteins or polypeptides that comprise or essentially consist of a single Nanobody (such as a single Nanobody of the invention) will be referred to herein as “monovalent” proteins or polypeptides or as “monovalent constructs”. Proteins and polypeptides that comprise or essentially consist of two or more Nanobodies (such as at least two Nanobodies of the invention or at least one Nanobody of the invention and at least one other Nanobody) will be referred to herein as “multivalent” proteins or polypeptides or as “multivalent constructs”, and these may provide certain advantages compared to the corresponding monovalent Nanobodies of the invention. Some non-limiting examples of such multivalent constructs will become clear from the further description herein.

[0521] According to one specific, but non-limiting aspect, a polypeptide of the invention comprises or essentially consists of at least two Nanobodies of the invention, such as two or three Nanobodies of the invention. As further described herein, such multivalent constructs can provide certain advantages compared to a protein or polypeptide comprising or essentially consisting of a single Nanobody of the invention, such as a much improved avidity for HER2. Such multivalent constructs will be clear to the skilled person based on the disclosure herein: some preferred, but non-limiting examples of such multivalent Nanobody constructs are the constructs of SEQ ID NO's: 2326-2390.

[0522] According to another specific, but non-limiting aspect, a polypeptide of the invention comprises or essentially consists of at least one Nanobody of the invention and at least one other binding unit (i.e. directed against another epitope, antigen, target, protein or polypeptide), which is preferably also a Nanobody. Such proteins or polypeptides are also referred to herein as “multispecific” proteins or polypeptides or as “multispecific constructs”, and these may provide certain advantages compared to the corresponding monovalent Nanobodies of the invention (as will become clear from the further discussion herein of some preferred, but non-limiting multispecific constructs). Such multispecific constructs will be clear to the skilled person based on the disclosure herein; some preferred, but non-limiting examples of such multispecific Nanobody constructs are the constructs of SEQ ID NO's: 2331-2390.

[0523] A multispecific polypeptide or protein comprising or essentially consists of at least one Nanobody of the invention and at least one other binding unit directed against another epitope or antigenic determinant on HER2 (which is preferably also a Nanobody) is also referred to as a “multiparatopic” protein or polypeptide or a “multiparatopic construct”.

[0524] Some preferred, but non-limiting examples of bivalent monospecific polypeptides of the invention are given in SEQ ID NO's: 2326-2330. Some preferred, but non-limiting examples of bispecific polypeptides of the invention are given in. SEQ ID NO's: 2331-2390. Some preferred, but non-limiting examples of biparatopic polypeptides of the invention are given in SEQ ID NO's: 2336-2390.

[0525] According to yet another specific, but non-limiting aspect, a polypeptide of the invention comprises or essentially consists of at least one Nanobody of the invention, optionally one or more further Nanobodies, and at least one other amino acid sequence (such as a protein or polypeptide) that confers at least one desired property to the Nanobody of the invention and/or to the resulting fusion protein. Again, such fusion proteins may provide certain advantages compared to the corresponding monovalent Nanobodies of the invention. Some non-limiting examples of such amino acid sequences and of such fusion constructs will become clear from the further description herein.

[0526] It is also possible to combine two or more of the above aspects, for example to provide a trivalent bispecific construct comprising two Nanobodies of the invention and one other Nanobody, and optionally one or more other amino acid sequences. Further non-limiting examples of such constructs, as well as some constructs that are particularly preferred within the context of the present invention, will become clear from the further description herein.

[0527] In the above constructs, the one or more Nanobodies and/or other amino acid sequences may be directly linked to each other and/or suitably linked to each other via one or more linker sequences. Some suitable but non-limiting examples of such linkers will become clear from the further description herein.

[0528] In one specific aspect of the invention, a Nanobody of the invention or a compound, construct or polypeptide of the invention comprising at least one Nanobody of the invention may have an increased half-life, compared to the corresponding amino acid sequence of the invention. Some preferred, but non-limiting examples of such Nanobodies, compounds and polypeptides will become clear to the skilled person based on the further disclosure herein, and for example comprise Nanobodies sequences or polypeptides of the invention that have been chemically modified to increase the half-life thereof (for example, by means of pegylation); amino acid sequences of the invention that comprise at least one additional binding site for binding to a serum protein (such as serum albumin); or polypeptides of the invention that comprise at least one Nanobody of the invention that is linked to at least one moiety (and in particular at least one amino acid sequence) that increases the half-life of the Nanobody of the invention. Examples of polypeptides of the invention that comprise such half-life extending moieties or amino acid sequences will become clear to the skilled person based on the further disclosure herein; and for example include, without limitation, polypeptides in which the one or more Nanobodies of the invention are suitable linked to one or more serum proteins or fragments thereof (such as serum albumin or suitable fragments thereof) or to one or more binding units that can bind to serum proteins (such as, for example, Nanobodies or (single) domain antibodies that can bind to serum proteins such as serum albumin, serum immunoglobulins such as IgG, or transferrine); polypeptides in which a Nanobody of the invention is linked to an Fc portion (such as a human Fc) or a suitable part or fragment thereof; or polypeptides in which the one or more Nanobodies of the invention are suitable linked to one or more small proteins or peptides that can bind to serum proteins (such as, without limitation, the proteins and peptides described in WO 91/01743, WO 01/45746, WO 02/076489 and to WO 08/068,280 of Ablynx N.V.

[0529] Again, as will be clear to the skilled person, such Nanobodies, compounds, constructs or polypeptides may contain one or more additional groups, residues, moieties or binding units, such as one or more further amino acid sequences and in particular one or more additional Nanobodies (i.e. not directed against HER2), so as to provide a tri- or multispecific Nanobody construct. Some preferred, but non-limiting examples of bispecific polypeptides of the invention that bind serum albumin are given in SEQ ID NOs: 2331-2335.

[0530] Generally, the Nanobodies of the invention (or compounds, constructs or polypeptides comprising the same) with increased half-life preferably have a half-life that is at least 1.5 times, preferably at least 2 times, such as at least 5 times, for example at least 10 times or more than 20 times, greater than the half-life of the corresponding amino acid sequence of the invention per se. For example, the Nanobodies, compounds, constructs or polypeptides of the invention with increased half-life may have a half-life that is increased with more than 1 hours, preferably more than 2 hours, more preferably more than 6 hours, such as more than 12 hours, or even more than 24, 48 or 72 hours, compared to the corresponding amino acid sequence of the invention per se.

[0531] In a preferred, but non-limiting aspect of the invention, such Nanobodies, compound, constructs or polypeptides of the invention exhibit a serum half-life in human of at least about 12 hours, preferably at least 24 hours, more preferably at least 48 hours, even more preferably at least 72 hours or more. For example, compounds or polypeptides of the invention may have a half-life of at least 5 days (such as about 5 to 10 days), preferably at least 9 days (such as about 9 to 14 days), more preferably at least about 10 days (such as about 10 to 15 days), or at least about 11 days (such as about 11 to 16 days), more preferably at least about 12 days (such as about 12 to 18 days or more), or more than 14 days (such as about 14 to 19 days).

[0532] In another one aspect of the invention, a polypeptide of the invention comprises one or more (such as two or preferably one) Nanobodies of the invention linked (optionally via one or more suitable linker sequences) to one or more (such as two and preferably one) amino acid sequences that allow the resulting polypeptide of the invention to cross the blood brain barrier. In particular, said one or more amino acid sequences that allow the resulting polypeptides of the invention to cross the blood brain barrier may be one or more (such as two and preferably one) Nanobodies, such as the Nanobodies described in WO 02/057445, of which FC44 (SEQ ID NO: 189 of WO 06/040153) and FC5 (SEQ ID NO: 190 of WO 06/040154) are preferred examples.

[0533] In particular, polypeptides comprising one or more Nanobodies of the invention are preferably such that they:
[0534] bind to HER2 with a dissociation constant (K_{D}) of 10⁻⁵ to 10⁻¹² moles/liter or less, and preferably 10⁻⁷ to 10⁻¹² moles/liter or less and more preferably 10⁻⁸ to 10⁻¹² moles/liter (i.e. with an association constant (K_{A}) of 10⁵ to 10¹² liter/moles or more, and preferably 10⁷ to 10¹² liter/moles or more and more preferably 10⁸ to 10¹² liter/moles);
   and/or such that they:
[0535] bind to HER2 with a kₒₙ-rate of between 10² M⁻¹ s⁻¹ to about 10⁷ M⁻¹ s⁻¹, preferably between 10³ M⁻¹ s⁻¹ and 10⁷ M⁻¹ s⁻¹, more preferably between 10⁴ M⁻¹ s⁻¹ and 10⁷ M⁻¹ s⁻¹, such as between 10⁵ M⁻¹ s⁻¹ and 10⁷ M⁻¹ s⁻¹;
   and/or such that they:
[0536] bind to HER2 with a k_{off} rate between 1 s⁻¹ (t_{1/2}=0.69 s) and 10⁻⁶ s⁻¹ (providing a near irreversible complex with a t_{1/2} of multiple days), preferably between 10⁻² s⁻¹ and 10⁻⁶ s⁻¹, more preferably between 10⁻³ s⁻¹ and 10⁻⁶ s⁻¹, such as between 10⁻⁴ s⁻¹ and 10⁻⁶ s⁻¹.

[0537] Preferably, a polypeptide that contains only one amino acid sequence of the invention is preferably such that it will bind to HER2 with an affinity less than 500 nM, preferably less than 200 nM, more preferably less than 10 nM, such as less than 500 pM. In this respect, it will be clear to the skilled person that a polypeptide that contains two or more Nanobodies of the invention may bind to HER2 with an increased avidity, compared to a polypeptide that contains only one amino acid sequence of the invention.

[0538] Some preferred IC₅₀ values for binding of the amino acid sequences or polypeptides of the invention to HER2 will become clear from the further description and examples herein.

[0539] Other polypeptides according to this preferred aspect of the invention may for example be chosen from the group consisting of amino acid sequences that have more than 80%, preferably more than 90%, more preferably more than 95%, such as 99% or more “sequence identity” (as defined herein) with one or more of the amino acid sequences of SEQ ID NO's: 2326-2390, in which the Nanobodies comprised within said amino acid sequences are preferably as further defined herein.

[0540] Particularly preferred amino acid sequences of the invention (including but not limited to Nanobodies) and polypeptides of the invention (including polypeptides that comprise one or more Nanobodies of the invention) are preferably such that they bind to the Herceptin® binding site on HER2 (and in particular domain IV of HER2, more in particular the C-terminus of domain IV of HER2) and/or such that they can compete with Herceptin® for binding to HER-2, and also:
[0541] bind to HER2 with a dissociation constant (K_{D}) of 10⁻⁵ to 10⁻¹² moles/liter or less, and preferably 10⁻⁷ to 10⁻¹² moles/liter or less and more preferably 10⁻⁸ to 10⁻¹² moles/liter (i.e. with an association constant (K_{A}) of 10⁵ to 10¹² liter/moles or more, and preferably 10⁷ to 10¹² liter/moles or more and more preferably 10⁸ to 10¹² liter/moles);
   and/or such that they:
[0542] bind to HER2 with a kₒₙ-rate of between 10² M⁻¹ s⁻¹ to about 10⁷ M⁻¹ s⁻¹, preferably between 10³ M⁻¹ s⁻¹ and 10⁷ M⁻¹ s⁻¹, more preferably between 10⁴ M⁻¹ s⁻¹ and 10⁷ M⁻¹ s⁻¹, such as between 10⁵ M⁻¹ s⁻¹ and 10⁷ M⁻¹ s⁻¹;
   and/or such that they:
[0543] bind to HER2 with a k_{off} rate between 1 s⁻¹ (t_{1/2}=0.69 s) and 10⁻⁶ s⁻¹ (providing a near irreversible complex with a t_{1/2} of multiple days), preferably between 10⁻² s⁻¹ and 10⁻⁶ s⁻¹, more preferably between 10⁻³ s⁻¹ and 10⁻⁶ s⁻¹, such as between 10⁻⁴ s⁻¹ and 10⁻⁶ s⁻¹.

[0544] Other particularly preferred amino acid sequences of the invention (including but not limited to Nanobodies) and polypeptides of the invention (including polypeptides that comprise one or more Nanobodies of the invention) are preferably such that they bind to the Omnitarg binding site on HER2 (and may in particular domain II of HER2, more in particular the middle of domain II of HER2) and/or such that they can compete with Omnitarg (or the Omnitarg Fab used in Example 9) for binding to HER-2, and also:
[0545] bind to HER2 with a dissociation constant (K_{D}) of 10⁻⁵ to 10⁻¹² moles/liter or less, and preferably 10⁻⁷ to 10⁻¹² moles/liter or less and more preferably 10⁻⁸ to 10⁻¹² moles/liter (i.e. with an association constant (K_{A}) of 10⁵ to 10¹² liter/moles or more, and preferably 10⁷ to 10¹² liter/moles or more and more preferably 10⁸ to 10¹² liter/moles);
   and/or such that they:
[0546] bind to HER2 with a kₒₙ-rate of between 10² M⁻¹ s⁻¹ to about 10⁷ M⁻¹ s⁻¹ preferably between 10³ M⁻¹ s⁻¹ and 10⁷ M⁻¹ s⁻¹, more preferably between 10⁴ M⁻¹ s⁻¹ and 10⁷ M⁻¹ s⁻¹, such as between 10⁵ M⁻¹ s⁻¹ and 10⁷ M⁻¹ s⁻¹;
   and/or such that they:
[0547] bind to HER2 with a k_{off} rate between s⁻¹ (t_{1/2}=0.69 s) and 10⁻⁶ s⁻¹ (providing a near irreversible complex with a t_{1/2} of multiple days), preferably between 10⁻² s⁻¹ and 10⁻⁶ s⁻¹, more preferably between 10⁻³ s⁻¹ and 10⁻⁶ s⁻¹, such as between 10⁻⁴ s⁻¹ and 10⁻⁶ s⁻¹.

[0548] Some specifically particularly preferred polypeptides of the invention (including polypeptides that comprise one or more Nanobodies of the invention) are preferably such that they (i) bind to the Omnitarg binding site on HER2 (and may in particular domain II of HER2, more in particular the middle of domain II of HER2) and/or can compete with Omnitarg (or the Omnitarg Fab used in Example 9) for binding to HER-2, and (ii) bind to the Herceptin® binding site on HER2 (and in particular domain IV of HER2, more in particular the C-terminus of domain IV of HER2) and/or can compete with Herceptin® for binding to HER-2, and (iii) also:
[0549] bind to HER2 with a dissociation constant (K_{D}) of 10⁻⁵ to 10⁻¹² moles/liter or less, and preferably 10⁻⁷ to 10⁻¹² moles/liter or less and more preferably 10⁻⁸ to 10⁻¹² moles/liter (i.e. with an association constant (K_{A}) of 10⁵ to 10¹² liter/moles or more, and preferably 10⁷ to 10¹² liter/moles or more and more preferably 10⁸ to 10¹² liter/moles);
   and/or such that they:
[0550] bind to HER2 with a kₒₙ-rate of between 10² M⁻¹ s⁻¹ to about 10⁷ M⁻¹ s⁻¹, preferably between 10³ M⁻¹ s⁻¹ and 10⁷ M⁻¹ s⁻¹, more preferably between 10⁴ M⁻¹ s⁻¹ and 10⁷ M⁻¹ s⁻¹, such as between 10⁵ M⁻¹ s⁻¹ and 10⁷ M⁻¹ s⁻¹;
   and/or such that they:
[0551] bind to HER2 with a k_{off} rate between 1 s⁻¹ (t_{1/2}=0.69 s) and 10⁻⁶ s⁻¹ (providing a near irreversible complex with a t_{1/2} of multiple days), preferably between 10⁻² s⁻¹ and 10⁻⁶ s⁻¹, more preferably between 10⁻³ s⁻¹ and 10⁻⁶ s⁻¹, such as between 10⁻⁴ s⁻¹ and 10⁻⁶ s⁻¹.

[0552] Another aspect of this invention relates to a nucleic acid that encodes an amino acid sequence of the invention (such as a Nanobody of the invention) or a polypeptide of the invention comprising the same. Again, as generally described herein for the nucleic acids of the invention, such a nucleic acid may be in the form of a genetic construct, as defined herein.

[0553] In another aspect, the invention relates to host or host cell that expresses or that is capable of expressing an amino acid sequence of the invention (such as a Nanobody) and/or a polypeptide of the invention comprising the same; and/or that contains a nucleic acid of the invention. Some preferred but non-limiting examples of such hosts or host cells will become clear from the further description herein.

[0554] Another aspect of the invention relates to a product or composition containing or comprising at least one amino acid of the invention (such as a Nanobody), at least one polypeptide of the invention and/or at least one nucleic acid of the invention, and optionally one or more further components of such compositions known per se, i.e. depending on the intended use of the composition. Such a product or composition may for example be a pharmaceutical composition (as described herein), a veterinary composition or a product or composition for diagnostic use (as also described herein). Some preferred but non-limiting examples of such products or compositions will become clear from the further description herein.

[0555] The invention further relates to methods for preparing or generating the amino acid sequences, compounds, constructs, polypeptides, nucleic acids, host cells, products and compositions described herein. Some preferred but non-limiting examples of such methods will become clear from the further description herein.

[0556] The invention further relates to applications and uses of the amino acid sequences, compounds, constructs, polypeptides, nucleic acids, host cells, products and compositions described herein, as well as to methods for the prevention and/or treatment for diseases and disorders associated with HER2. Some preferred but non-limiting applications and uses will become clear from the further description herein.

[0557] Other aspects, embodiments, advantages and applications of the invention will also become clear from the further description hereinbelow.

[0558] Generally, it should be noted that the term Nanobody as used herein in its broadest sense is not limited to a specific biological source or to a specific method of preparation. For example, as will be discussed in more detail below, the Nanobodies of the invention can generally be obtained: (1) by isolating the V_{HH} domain of a naturally occurring heavy chain antibody; (2) by expression of a nucleotide sequence encoding a naturally occurring V_{HH} domain; (3) by “humanization” (as described herein) of a naturally occurring V_{HH} domain or by expression of a nucleic acid encoding a such humanized V_{HH} domain; (4) by “camelization” (as described herein) of a naturally occurring V_{H} domain from any animal species, and in particular a from species of mammal, such as from a human being, or by expression of a nucleic acid encoding such a camelized V_{H} domain; (5) by “camelisation” of a “domain antibody” or “Dab” as described by Ward et al (supra), or by expression of a nucleic acid encoding such a camelized V_{H} domain; (6) by using synthetic or semi-synthetic techniques for preparing proteins, polypeptides or other amino acid sequences known per se; (7) by preparing a nucleic acid encoding a Nanobody using techniques for nucleic acid synthesis known per se, followed by expression of the nucleic acid thus obtained; and/or (8) by any combination of one or more of the foregoing. Suitable methods and techniques for performing the foregoing will be clear to the skilled person based on the disclosure herein and for example include the methods and techniques described in more detail herein.

[0559] One preferred class of Nanobodies corresponds to the V_{HH} domains of naturally occurring heavy chain antibodies directed against HER2. As further described herein, such V_{HH} sequences can generally be generated or obtained by suitably immunizing a species of Camelid with HER2 (i.e. so as to raise an immune response and/or heavy chain antibodies directed against HER2), by obtaining a suitable biological sample from said Camelid (such as a blood sample, serum sample or sample of B-cells), and by generating V_{HH} sequences directed against HER2, starting from said sample, using any suitable technique known per se. Such techniques will be clear to the skilled person and/or are further described herein.

[0560] Alternatively, such naturally occurring V_{HH} domains against HER2, can be obtained from naïve libraries of Camelid V_{HH} sequences, for example by screening such a library using HER2, or at least one part, fragment, antigenic determinant or epitope thereof using one or more screening techniques known per se. Such libraries and techniques are for example described in WO 99/37681, WO 01/90190, WO 03/025020 and WO 03/035694. Alternatively, improved synthetic or semi-synthetic libraries derived from naïve V_{HH} libraries may be used, such as V_{HH} libraries obtained from naïve V_{HH} libraries by techniques such as random mutagenesis and/or CDR shuffling, as for example described in WO 00/43507.

[0561] Thus, in another aspect, the invention relates to a method for generating Nanobodies, that are directed against HER2. In one aspect, said method at least comprises the steps of:
[0562] a) providing a set, collection or library of Nanobody sequences; and
[0563] b) screening said set, collection or library of Nanobody sequences for Nanobody sequences that can bind to and/or have affinity for HER2;
   and
[0564] c) isolating the amino Nanobody or Nanobodies that can bind to and/or have affinity for HER2.

[0565] In such a method, the set, collection or library of Nanobody sequences may be a naïve set, collection or library of Nanobody sequences; a synthetic or semi-synthetic set, collection or library of Nanobody sequences; and/or a set, collection or library of Nanobody sequences that have been subjected to affinity maturation.

[0566] In a preferred aspect of this method, the set, collection or library of Nanobody sequences may be an immune set, collection or library of Nanobody sequences, and in particular an immune set, collection or library of V_{HH} sequences, that have been derived from a species of Camelid that has been suitably immunized with HER2 or with a suitable antigenic determinant based thereon or derived therefrom, such as an antigenic part, fragment, region, domain, loop or other epitope thereof. In one particular aspect, said antigenic determinant may be an extracellular part, region, domain, loop or other extracellular epitope(s).

[0567] In the above methods, the set, collection or library of Nanobody or V_{HH} sequences may be displayed on a phage, phagemid, ribosome or suitable micro-organism (such as yeast), such as to facilitate screening. Suitable methods, techniques and host organisms for displaying and screening (a set, collection or library of) Nanobody sequences will be clear to the person skilled in the art, for example on the basis of the further disclosure herein. Reference is also made to WO 03/054016 and to the review by Hoogenboom in Nature Biotechnology, 23, 9, 1105-1116 (2005).

[0568] In another aspect, the method for generating Nanobody sequences comprises at least the steps of:
[0569] a) providing a collection or sample of cells derived from a species of Camelid that express immunoglobulin sequences;
[0570] b) screening said collection or sample of cells for (i) cells that express an immunoglobulin sequence that can bind to and/or have affinity for HER2; and (ii) cells that express heavy chain antibodies, in which substeps (i) and (ii) can be performed essentially as a single screening step or in any suitable order as two separate screening steps, so as to provide at least one cell that expresses a heavy chain antibody that can bind to and/or has affinity for HER2;
   and
[0571] c) either (1) isolating from said cell the V_{HH} sequence present in said heavy chain antibody; or (ii) isolating from said cell a nucleic acid sequence that encodes the V_{HH} sequence present in said heavy chain antibody, followed by expressing said V_{HH} domain.

[0572] In the method according to this aspect, the collection or sample of cells may for example be a collection or sample of B-cells. Also, in this method, the sample of cells may be derived from a Camelid that has been suitably immunized with HER2 or a suitable antigenic determinant based thereon or derived therefrom, such as an antigenic part, fragment, region, domain, loop or other epitope thereof. In one particular aspect, said antigenic determinant may be an extracellular part, region, domain, loop or other extracellular epitope(s).

[0573] The above method may be performed in any suitable manner, as will be clear to the skilled person. Reference is for example made to EP 0 542 810, WO 05/19824, WO 04/051268 and WO 04/106377. The screening of step b) is preferably performed using a flow cytometry technique such as FACS. For this, reference is for example made to Lieby et al., Blood, Vol. 97, No. 12, 3820. Particular reference is made to the so-called “Nanoclone®” technique described in International application WO 06/079372 by Ablynx N.V.

[0574] In another aspect, the method for generating an amino acid sequence directed against HER2 may comprise at least the steps of:
[0575] a) providing a set, collection or library of nucleic acid sequences encoding heavy chain antibodies or Nanobody sequences;
[0576] b) screening said set, collection or library of nucleic acid sequences for nucleic acid sequences that encode a heavy chain antibody or a Nanobody sequence that can bind to and/or has affinity for HER2;
   and
[0577] c) isolating said nucleic acid sequence, followed by expressing the V_{HH} sequence present in said heavy chain antibody or by expressing said Nanobody sequence, respectively.

[0578] In such a method, the set, collection or library of nucleic acid sequences encoding heavy chain antibodies or Nanobody sequences may for example be a set, collection or library of nucleic acid sequences encoding a naïve set, collection or library of heavy chain antibodies or V_{HH} sequences; a set, collection or library of nucleic acid sequences encoding a synthetic or semi-synthetic set, collection or library of Nanobody sequences; and/or a set, collection or library of nucleic acid sequences encoding a set, collection or library of Nanobody sequences that have been subjected to affinity maturation.

[0579] In a preferred aspect of this method, the set, collection or library of nucleic acid sequences may be an immune set, collection or library of nucleic acid sequences encoding heavy chain antibodies or V_{HH} sequences derived from a Camelid that has been suitably immunized with HER2 or with a suitable antigenic determinant based thereon or derived therefrom, such as an antigenic part, fragment, region, domain, loop or other epitope thereof. In one particular aspect, said antigenic determinant may be an extracellular part, region, domain, loop or other extracellular epitope(s).

[0580] In the above methods, the set, collection or library of nucleotide sequences may be displayed on a phage, phagemid, ribosome or suitable micro-organism (such as yeast), such as to facilitate screening. Suitable methods, techniques and host organisms for displaying and screening (a set, collection or library of) nucleotide sequences encoding amino acid sequences will be clear to the person skilled in the art, for example on the basis of the further disclosure herein. Reference is also made to WO 03/054016 and to the review by Hoogenboom in Nature Biotechnology, 23, 9, 1105-1116 (2005).

[0581] Also encompassed within the present invention are methods for preparing and generating multiparatopic (such as e.g. biparatopic, triparatopic, etc.) amino acids of the invention.

[0582] Without being limiting, a method for preparing and generating biparatopic amino acids of the invention may comprise at least the steps of:
[0583] a) providing a nucleic acid sequence encoding an HER2 binding amino acid sequence fused to a set, collection or library of nucleic acid sequences encoding amino acid sequences;
[0584] b) screening said set, collection or library of nucleic acid sequences for nucleic acid sequences that encode an amino acid sequence that can bind to and/or has affinity for an antigenic determinant on HER2 different from the antigenic determinant recognized by the HER2 binding amino acid sequence;
   and
[0585] c) isolating the nucleic acid sequence encoding an HER2 binding amino acid sequence fused to the nucleic acid sequence obtained in b), followed by expressing the encoded amino acid sequence.

[0586] The biparatopic amino acid sequence obtained in the method above, can subsequently be fused to one or more further sets, collections or libraries of nucleic acid sequences encoding amino acid sequences and again screened for nucleic acid sequences that encode an amino acid sequence that can bind to and/or has affinity for an antigenic determinant on HER2 different from the antigenic determinant of the HER2 binding amino acid sequence and the antigenic determinant of b) in order to obtain a triparatopic or multiparatopic amino acid sequence respectively.

[0587] In such a method, the set, collection or library of nucleic acid sequences encoding amino acid sequences may for example be a set, collection or library of nucleic acid sequences encoding a naïve set, collection or library of immunoglobulin sequences; a set, collection or library of nucleic acid sequences encoding a synthetic or semi-synthetic set, collection or library of immunoglobulin sequences; and/or a set, collection or library of nucleic acid sequences encoding a set, collection or library of immunoglobulin sequences that have been subjected to affinity maturation.

[0588] Also, in such a method, the set, collection or library of nucleic acid sequences may encode a set, collection or library of heavy chain variable domains (such as V_{H} domains or V_{HH} domains) or of light chain variable domains. For example, the set, collection or library of nucleic acid sequences may encode a set, collection or library of domain antibodies or single domain antibodies, or a set, collection or library of amino acid sequences that are capable of functioning as a domain antibody or single domain antibody.

[0589] In a preferred aspect of this method, the set, collection or library of amino acid sequences may be an immune set, collection or library of nucleic acid sequences, for example derived from a mammal that has been suitably immunized with HER2 or with a suitable antigenic determinant based thereon or derived therefrom, such as an antigenic part, fragment, region, domain, loop or other epitope thereof. In one particular aspect, said antigenic determinant may be an extracellular part, region, domain, loop or other extracellular epitope(s).

[0590] The set, collection or library of nucleic acid sequences may for example encode an immune set, collection or library of heavy chain variable domains or of light chain variable domains. In one specific aspect, the set, collection or library of nucleotide sequences may encode a set, collection or library of V_{HH} sequences.

[0591] In the above methods, the nucleic acid sequence encoding an HER2 binding amino acid sequence fused to the set, collection or library of nucleotide sequences may be displayed on a phage, phagemid, ribosome or suitable micro-organism (such as yeast), such as to facilitate screening. Suitable methods, techniques and host organisms for displaying and screening (a set, collection or library of) nucleotide sequences encoding amino acid sequences will be clear to the person skilled in the art, for example on the basis of the further disclosure herein. Reference is also made to the review by Hoogenboom in Nature Biotechnology, 23, 9, 1105-1116 (2005).

[0592] According to a particularly preferred aspect, a method for preparing and generating biparatopic amino acids of the invention may comprise at least the steps of:
[0593] a) providing a set, collection or library of nucleic acid sequences, in which each nucleic acid sequence in said set, collection or library encodes a fusion protein that comprises a first amino acid sequence that can bind to and/or has affinity for a first antigenic determinant, part, domain or epitope on HER2 that is fused (optionally via a linker sequence) to a second amino acid sequence, in which essentially each second amino acid sequence (or most of these) is a different member of a set, collection or library of different amino acid sequences;
[0594] b) screening said set, collection or library of nucleic acid sequences for nucleic acid sequences that encode an amino acid sequence that can bind to and/or has affinity for a second antigenic determinant, part, domain or epitope on HER2 different from the first antigenic determinant, part, domain or epitope on HER-2;
   and
[0595] c) isolating the nucleic acid sequences that encode an amino acid sequence that can bind to and/or has affinity for a second antigenic determinant, part, domain or epitope on HER2 different from the first antigenic determinant, part, domain or epitope on HER-2, obtained in b), optionally followed by expressing the encoded amino acid sequence.

[0596] In this preferred method, the first amino acid sequence in the fusion protein encoded by said set collection or library of nucleic acid sequences may be the same amino acid sequence for all members of the set, collection or library of nucleic acid sequences encoding the fusion protein; or the first amino acid sequence in the fusion protein encoded by said set collection or library of nucleic acid sequences may also be a member of a set collection or library of different amino acid sequences.

[0597] Again, in such a method, the set, collection or library of nucleic acid sequences encoding amino acid sequences may for example be a set, collection or library of nucleic acid sequences encoding a naïve set, collection or library of immunoglobulin sequences; a set, collection or library of nucleic acid sequences encoding a synthetic or semi-synthetic set, collection or library of immunoglobulin sequences; and/or a set, collection or library of nucleic acid sequences encoding a set, collection or library of immunoglobulin sequences that have been subjected to affinity maturation.

[0598] Also, in such a method, the set, collection or library of nucleic acid sequences may encode a set, collection or library of heavy chain variable domains (such as V_{H} domains or V_{HH} domains) or of light chain variable domains. For example, the set, collection or library of nucleic acid sequences may encode a set, collection or library of domain antibodies or single domain antibodies, or a set, collection or library of amino acid sequences that are capable of functioning as a domain antibody or single domain antibody.

[0599] In a preferred aspect of this method, the set, collection or library of amino acid sequences may be an immune set, collection or library of nucleic acid sequences, for example derived from a mammal that has been suitably immunized with HER2 or with a suitable antigenic determinant based thereon or derived therefrom, such as an antigenic part, fragment, region, domain, loop or other epitope thereof. In one particular aspect, said antigenic determinant may be an extracellular part, region, domain, loop or other extracellular epitope(s).

[0600] The set, collection or library of nucleic acid sequences may for example encode an immune set, collection or library of heavy chain variable domains or of light chain variable domains. In one specific aspect, the set, collection or library of nucleotide sequences may encode a set, collection or library of V_{HH} sequences.

[0601] In the above methods, the nucleic acid sequence encoding an HER2 binding amino acid sequence fused to the set, collection or library of nucleotide sequences may be displayed on a phage, phagemid, ribosome or suitable micro-organism (such as yeast), such as to facilitate screening. Suitable methods, techniques and host organisms for displaying and screening (a set, collection or library of) nucleotide sequences encoding amino acid sequences will be clear to the person skilled in the art, for example on the basis of the further disclosure herein. Reference is also made to the review by Hoogenboom in Nature Biotechnology, 23, 9, 1105-1116 (2005).

[0602] In step b), the set, collection or library of nucleic acid sequences may also be screened for nucleic acid sequences that encode an amino acid sequence that can bind to and/or has affinity for both the first antigenic determinant, part, domain or epitope on HER2 and the second antigenic determinant, part, domain or epitope on HER2. This may for example be performed in a subsequent steps (i.e. by in a first step screening or selecting for nucleic acid sequences that encode an amino acid sequence that can bind to and/or has affinity for the second antigenic determinant, part, domain or epitope on HER2, and subsequently in a second step selecting or screening for nucleic acid sequences that encode an amino acid sequence that can bind to and/or has affinity for the first antigenic determinant, part, domain or epitope on HER2; or visa versa) or in a single step (i.e. by simultaneously screening or selecting for nucleic acid sequences that encode an amino acid sequence that can bind to and/or has affinity for both the first antigenic determinant, part, domain or epitope on HER2 and the second antigenic determinant, part, domain or epitope on HER2).

[0603] In a preferred aspect of the above method, the first amino acid sequence used in step a) is preferably such that (i) it can bind to and/or has affinity for the Herceptin® binding site on HER2 (and may in particular be directed against domain IV of HER2, more in particular the C-terminus of domain IV of HER2) and/or (ii) competes with Herceptin® for binding to HER-2; and in step b), the set, collection or library of nucleic acid sequences is screened for nucleic acid sequences that encode (i) an amino acid sequence that can bind to and/or has affinity for the Omnitarg binding site on HER2 (and may in particular domain II of HER2, more in particular the middle of domain II of HER2) and/or (ii) an amino acid sequence that can compete with Omnitarg (or the Omnitarg Fab used in Example 9) for binding to HER-2.

[0604] Alternatively, the first amino acid sequence used in step a) is preferably such that (i) it can bind to and/or has affinity for the Omnitarg binding site on HER2 (and may in particular domain II of HER2, more in particular the middle of domain II of HER2) and/or (ii) competes with Omnitarg for binding to HER-2; and in step b), the set, collection or library of nucleic acid sequences is screened for nucleic acid sequences that encode (i) an amino acid sequence that can bind to and/or has affinity for the Herceptin® binding site on HER2 (and in particular domain IV of HER2, more in particular the C-terminus of domain IV of HER2) and/or (ii) an amino acid sequence that can compete with Herceptin® for binding to HER-2.

[0605] In the above methods, screening or selecting for (nucleic acid sequences that encode) amino acid sequences that compete with Herceptin® or Omnitarg, respectively, may be performed using generally known methods for screening or selecting for competitors of known binding molecules, which may for example involve performing the screening or selection in the presence of the binding molecule and/or determining the binding affinity of the compound(s) to be screened in the presence of the binding molecule.

[0606] It is also possible, in step b), to screen for nucleic acid sequences that both (i) encode an amino acid sequence that can bind to and/or has affinity for the Omnitarg binding site on HER2 (and in particular domain II of HER2, more in particular the middle of domain II of HER2) and/or that can compete with Omnitarg® (or the Omnitarg Fab used in Example 9) for binding to HER-2; and that also (ii) encode an amino acid sequence that can bind to and/or has affinity for the Herceptin® binding site on HER2 (and in particular domain IV of HER2, more in particular the C-terminus of domain IV of HER2) and/or that can compete with Herceptin® for binding to HER-2. Again, this may be performed in separate steps or a single step, and by selecting or screening in the presence of Herceptin® and/or Omnitarg, as applicable.

[0607] It will also be clear to the skilled person that the above methods may be performed by screening a set, collection or library of amino acid sequences that correspond to (e.g. are encoded by) the nucleic acid sequences used in the above method; and such methods form further aspects of the invention.

[0608] The invention in a further aspect provides a method for preparing and generating biparatopic amino acids of the invention which comprises at least the steps of:
[0609] a) providing a set, collection or library of nucleic acid sequences, in which each nucleic acid sequence in said set, collection or library encodes a fusion protein that comprises a first amino acid sequence that can bind to and/or has affinity for a first antigenic determinant, part, domain or epitope on HER2 that is fused via a linker sequence to a second amino acid sequence that has can bind to and/or has affinity for a second antigenic determinant, part, domain or epitope on HER2 (which may be the same or different as the first antigenic determinant, part, domain or epitope on HER2), in which essentially each nucleic acid sequence (or most of these) encodes a fusion protein with a different linker sequence so as to provide a set, collection or library encoding different fusion proteins;
[0610] b) screening said set, collection or library of nucleic acid sequences for nucleic acid sequences that encode an amino acid sequence that can bind to and/or has affinity for the first and second antigenic determinant, part, domain or epitope on HER2;
   and
[0611] c) isolating the nucleic acid sequences that encode an amino acid sequence that can bind to and/or has affinity for the first and second antigenic determinant, part, domain or epitope on HER2, optionally followed by expressing the encoded amino acid sequence.

[0612] As will be clear to the skilled person, this method can be used to screen for suitable or even optimal linker lengths for linking the first and second amino acid sequence. For example, in this aspect, the first amino acid sequence may be an amino acid sequence that can bind to and/or has affinity for the Omnitarg binding site on HER2 (and may in particular domain II of HER2, more in particular the middle of domain II of HER2) and/or that can compete with Omnitarg (or the Omnitarg Fab used in Example 9); and the second amino acid sequence may be an amino acid sequence that can bind to and/or has affinity for the Herceptin® binding site on HER2 (and in particular domain IV of HER2, more in particular the C-terminus of domain IV of HER2) and/or that can compete with Herceptin® for binding to HER-2 (or visa versa). The screening and selection step b) may be performed as further described above.

[0613] Another method for preparing and generating biparatopic amino acids of the invention may comprise at least the steps of:
[0614] a) providing a set, collection or library of nucleic acid sequences encoding amino acid sequences;
[0615] b) screening said set, collection or library of nucleic acid sequences for a set, collection or library of nucleic acid sequences that encode an amino acid sequence that can bind to and/or has affinity for HER2;
[0616] c) ligating said set, collection or library of nucleic acid sequences that encode an amino acid sequence that can bind to and/or has affinity for HER2 to another nucleic acid sequence that encodes an amino acid sequence that can bind to and/or has affinity for HER2 (e.g. a nucleic acid sequence that encodes an amino acid sequence that competes with Herceptin® for binding HER2);
   and
[0617] d) from the set, collection or library of nucleic acid sequences obtained in c), isolating the nucleic acid sequences encoding a biparatopic amino acid sequence that can bind to and/or has affinity for HER2 (and e.g. further selecting for nucleic acid sequences that encode a biparatopic amino acid sequence that antagonizes with higher potency compared to the monovalent amino acid sequences), followed by expressing the encoded amino acid sequence.

[0618] The biparatopic amino acid sequence obtained in the method above, can subsequently be fused to one or more further sets, collections or libraries of nucleic acid sequences encoding amino acid sequences that can bind to and/or have affinity for HER2 in order to obtain a triparatopic or multiparatopic amino acid sequence respectively.

[0619] In such a method, the set, collection or library of nucleic acid sequences encoding amino acid sequences may for example be a set, collection or library of nucleic acid sequences encoding a naïve set, collection or library of immunoglobulin sequences; a set, collection or library of nucleic acid sequences encoding a synthetic or semi-synthetic set, collection or library of immunoglobulin sequences; and/or a set, collection or library of nucleic acid sequences encoding a set, collection or library of immunoglobulin sequences that have been subjected to affinity maturation.

[0620] The set, collection or library of nucleic acid sequences that encode an amino acid sequence that can bind to and/or has affinity for HER2 can be obtained by any selection or screening method known in the art for the selection and/or screening of nucleic acid sequences that encode an amino acid sequence that can bind to and/or has affinity for HER2 and as, for example, described in the Examples section.

[0621] Also, in such a method, the set, collection or library of nucleic acid sequences may encode a set, collection or library of heavy chain variable domains (such as V_{H} domains or V_{HH} domains) or of light chain variable domains. For example, the set, collection or library of nucleic acid sequences may encode a set, collection or library of domain antibodies or single domain antibodies, or a set, collection or library of amino acid sequences that are capable of functioning as a domain antibody or single domain antibody.

[0622] In a preferred aspect of this method, the set, collection or library of amino acid sequences may be an immune set, collection or library of nucleic acid sequences, for example derived from a mammal that has been suitably immunized with HER2 or with a suitable antigenic determinant based thereon or derived therefrom, such as an antigenic part, fragment, region, domain, loop or other epitope thereof. In one particular aspect, said antigenic determinant may be an extracellular part, region, domain, loop or other extracellular epitope(s).

[0623] The set, collection or library of nucleic acid sequences may for example encode an immune set, collection or library of heavy chain variable domains or of light chain variable domains. In one specific aspect, the set, collection or library of nucleotide sequences may encode a set, collection or library of V_{HH} sequences.

[0624] In the above methods, the nucleic acid sequence may be displayed on a phage, phagemid, ribosome or suitable micro-organism (such as yeast), such as to facilitate screening. Suitable methods, techniques and host organisms for displaying and screening (a set, collection or library of) nucleotide sequences encoding amino acid sequences will be clear to the person skilled in the art, for example on the basis of the further disclosure herein. Reference is also made to the review by Hoogenboom in Nature Biotechnology, 23, 9, 1105-1116 (2005).

[0625] Another method for preparing and generating biparatopic amino acids of the invention may comprise at least the steps of:
[0626] a) providing a first set, collection or library of nucleic acid sequences encoding amino acid sequences;
[0627] b) screening said first set, collection or library of nucleic acid sequences for a nucleic acid sequence that encodes an amino acid sequence that can bind to and/or has affinity for a first antigenic determinant, part, domain or epitope on HER2;
[0628] c) ligating the nucleic acid sequence encoding said amino acid sequence that can bind to and/or has affinity for a first antigenic determinant, part, domain or epitope on HER2 to another set, collection or library of nucleic acid sequences encoding amino acid sequences to obtain a set, collection or library of nucleic acid sequences that encode fusion proteins;
[0629] d) screening said set, collection or library of nucleic acid sequences obtained in step c) for a nucleic acid sequence that encodes an amino acid sequence that can bind a second antigenic determinant, part, domain or epitope on HER2 different from the first antigenic determinant, part, domain or epitope on HER-2;
   and
   [0630] e) isolating the nucleic acid sequence that encodes an amino acid sequence that can bind to and/or has affinity for the first and second antigenic determinant, part, domain or epitope on HER2, optionally followed by expressing the encoded amino acid sequence.

[0631] In a preferred aspect of the above method, the first amino acid sequence used in step a) is preferably such that (i) it can bind to and/or has affinity for the Herceptin® binding site on HER2 (and may in particular be directed against domain IV of HER2, more in particular the C-terminus of domain IV of HER2) and/or (ii) competes with Herceptin® for binding to HER-2; and in step b), the set, collection or library of nucleic acid sequences is screened for nucleic acid sequences that encode (i) an amino acid sequence that can bind to and/or has affinity for the Omnitarg binding site on HER2 (and may in particular domain II of HER2, more in particular the middle of domain II of HER2) and/or (ii) an amino acid sequence that can compete with Omnitarg (or the Omnitarg Fab used in Example 9) for binding to HER-2.

[0632] Alternatively, the first amino acid sequence used in step a) is preferably such that (i) it can bind to and/or has affinity for the Omnitarg binding site on HER2 (and may in particular domain II of HER2, more in particular the middle of domain II of HER2) and/or (ii) competes with Omnitarg for binding to HER-2; and in step b), the set, collection or library of nucleic acid sequences is screened for nucleic acid sequences that encode (i) an amino acid sequence that can bind to and/or has affinity for the Herceptin® binding site on HER2 (and in particular domain IV of HER2, more in particular the C-terminus of domain IV of HER2) and/or (ii) an amino acid sequence that can compete with Herceptin® for binding to HER-2.

[0633] In the above methods, screening or selecting for (nucleic acid sequences that encode) amino acid sequences that compete with Herceptin® or Omnitarg, respectively, may be performed using generally known methods for screening or selecting for competitors of known binding molecules, which may for example involve performing the screening or selection in the presence of the binding molecule and/or determining the binding affinity of the compound(s) to be screened in the presence of the binding molecule.

[0634] It is also possible, in step b), to screen for nucleic acid sequences that both (i) encode an amino acid sequence that can bind to and/or has affinity for the Omnitarg binding site on HER2 (and in particular domain II of HER2, more in particular the middle of domain II of HER2) and/or that can compete with Omnitarg (or the Omnitarg Fab used in Example 9) for binding to HER-2; and that also (ii) encode an amino acid sequence that can bind to and/or has affinity for the Herceptin® binding site on HER2 (and in particular domain IV of HER2, more in particular the C-terminus of domain IV of HER2) and/or that can compete with Herceptin® for binding to HER-2. Again, this may be performed in separate steps or a single step, and by selecting or screening in the presence of Herceptin® and/or Omnitarg, as applicable.

[0635] The biparatopic amino acid sequence obtained in the method above, can subsequently be fused to one or more further sets, collections or libraries of nucleic acid sequences encoding amino acid sequences that can bind to and/or have affinity for HER2 in order to obtain a triparatopic or multiparatopic amino acid sequence respectively.

[0636] In such a method, the set, collection or library of nucleic acid sequences encoding amino acid sequences may for example be a set, collection or library of nucleic acid sequences encoding a naïve set, collection or library of immunoglobulin sequences; a set, collection or library of nucleic acid sequences encoding a synthetic or semi-synthetic set, collection or library of immunoglobulin sequences; and/or a set, collection or library of nucleic acid sequences encoding a set, collection or library of immunoglobulin sequences that have been subjected to affinity maturation.

[0637] The set, collection or library of nucleic acid sequences that encode an amino acid sequence that can bind to and/or has affinity for HER2 can be obtained by any selection or screening method known in the art for the selection and/or screening of nucleic acid sequences that encode an amino acid sequence that can bind to and/or has affinity for HER2 and as, for example, described in the Examples section.

[0638] Also, in such a method, the set, collection or library of nucleic acid sequences may encode a set, collection or library of heavy chain variable domains (such as V_{H} domains or V_{HH} domains) or of light chain variable domains. For example, the set, collection or library of nucleic acid sequences may encode a set, collection or library of domain antibodies or single domain antibodies, or a set, collection or library of amino acid sequences that are capable of functioning as a domain antibody or single domain antibody.

[0639] In a preferred aspect of this method, the set, collection or library of amino acid sequences may be an immune set, collection or library of nucleic acid sequences, for example derived from a mammal that has been suitably immunized with HER2 or with a suitable antigenic determinant based thereon or derived therefrom, such as an antigenic part, fragment, region, domain, loop or other epitope thereof. In one particular aspect, said antigenic determinant may be an extracellular part, region, domain, loop or other extracellular epitope(s).

[0640] The set, collection or library of nucleic acid sequences may for example encode an immune set, collection or library of heavy chain variable domains or of light chain variable domains. In one specific aspect, the set, collection or library of nucleotide sequences may encode a set, collection or library of V_{HH} sequences.

[0641] In the above methods, the nucleic acid sequence may be displayed on a phage, phagemid, ribosome or suitable micro-organism (such as yeast), such as to facilitate screening. Suitable methods, techniques and host organisms for displaying and screening (a set, collection or library of) nucleotide sequences encoding amino acid sequences will be clear to the person skilled in the art, for example on the basis of the further disclosure herein. Reference is also made to the review by Hoogenboom in Nature Biotechnology, 23, 9, 1105-1116 (2005).

[0642] As will be clear to the skilled person, the screening step of the methods described herein can also be performed as a selection step. Accordingly the term “screening” as used in the present description can comprise selection, screening or any suitable combination of selection and/or screening techniques. Also, when a set, collection or library of sequences is used, it may contain any suitable number of sequences, such as 1, 2, 3 or about 5, 10, 50, 100, 500, 1000, 5000, 10⁴, 10⁵, 10⁶, 10⁷, 10⁸ or more sequences.

[0643] Also, one or more or all of the sequences in the above set, collection or library of amino acid sequences may be obtained or defined by rational, or semi-empirical approaches such as computer modelling techniques or biostatics or datamining techniques.

[0644] Furthermore, such a set, collection or library can comprise one, two or more sequences that are variants from one another (e.g. with designed point mutations or with randomized positions), compromise multiple sequences derived from a diverse set of naturally diversified sequences (e.g. an immune library)), or any other source of diverse sequences (as described for example in Hoogenboom et al. (Nat Biotechnol 23:1105, 2005) and Binz et al. (Nat Biotechnol 2005, 23:1247)). Such set, collection or library of sequences can be displayed on the surface of a phage particle, a ribosome, a bacterium, a yeast cell, a mammalian cell, and linked to the nucleotide sequence encoding the amino acid sequence within these carriers. This makes such set, collection or library amenable to selection procedures to isolate the desired amino acid sequences of the invention. More generally, when a sequence is displayed on a suitable host or host cell, it is also possible (and customary) to first isolate from said host or host cell a nucleotide sequence that encodes the desired sequence, and then to obtain the desired sequence by suitably expressing said nucleotide sequence in a suitable host organism. Again, this can be performed in any suitable manner known per se, as will be clear to the skilled person.

[0645] Yet another technique for obtaining V_{HH} sequences or Nanobody sequences directed against HER2 involves suitably immunizing a transgenic mammal that is capable of expressing heavy chain antibodies (i.e. so as to raise an immune response and/or heavy chain antibodies directed against HER2), obtaining a suitable biological sample from said transgenic mammal that contains (nucleic acid sequences encoding) said V_{HH} sequences or Nanobody sequences (such as a blood sample, serum sample or sample of B-cells), and then generating V_{HH} sequences directed against HER2, starting from said sample, using any suitable technique known per se (such as any of the methods described herein or a hybridoma technique). For example, for this purpose, the heavy chain antibody-expressing mice and the further methods and techniques described in WO 02/085945, WO 04/049794 and WO 06/008548 and Janssens et al. (Proc. Natl. Acad. Sci. USA. 2006 Oct. 10; 103(41):15130-5) can be used. For example, such heavy chain antibody expressing mice can express heavy chain antibodies with any suitable (single) variable domain, such as (single) variable domains from natural sources (e.g. human (single) variable domains, Camelid (single) variable domains or shark (single) variable domains), as well as for example synthetic or semi-synthetic (single) variable domains.

[0646] The invention also relates to the V_{HH} sequences or Nanobody sequences that are obtained by the above methods, or alternatively by a method that comprises the one of the above methods and in addition at least the steps of determining the nucleotide sequence or amino acid sequence of said V_{HH} sequence or Nanobody sequence; and of expressing or synthesizing said V_{HH} sequence or Nanobody sequence in a manner known per se, such as by expression in a suitable host cell or host organism or by chemical synthesis.

[0647] As mentioned herein, a particularly preferred class of Nanobodies of the invention comprises Nanobodies with an amino acid sequence that corresponds to the amino acid sequence of a naturally occurring V_{HH} domain, but that has been “humanized”, i.e. by replacing one or more amino acid residues in the amino acid sequence of said naturally occurring V_{HH} sequence (and in particular in the framework sequences) by one or more of the amino acid residues that occur at the corresponding position(s) in a V_{H} domain from a conventional 4-chain antibody from a human being (e.g. indicated above). This can be performed in a manner known per se, which will be clear to the skilled person, for example on the basis of the further description herein and the prior art on humanization referred to herein. Again, it should be noted that such humanized Nanobodies of the invention can be obtained in any suitable mariner known per se (i.e. as indicated under points (1)-(8) above) and thus are not strictly limited to polypeptides that have been obtained using a polypeptide that comprises a naturally occurring V_{HH} domain as a starting material.

[0648] Another particularly preferred class of Nanobodies of the invention comprises Nanobodies with an amino acid sequence that corresponds to the amino acid sequence of a naturally occurring V_{H} domain, but that has been “camelized”, i.e. by replacing one or more amino acid residues in the amino acid sequence of a naturally occurring V_{H} domain from a conventional 4-chain antibody by one or more of the amino acid residues that occur at the corresponding position(s) in a V_{HH} domain of a heavy chain antibody. This can be performed in a manner known per se, which will be clear to the skilled person, for example on the basis of the further description herein. Such “camelizing” substitutions are preferably inserted at amino acid positions that form and/or are present at the V_{H}-V_{L} interface, and/or at the so-called Camelidae hallmark residues, as defined herein (see for example WO 94/04678 and Davies and Riechmann (1994 and 1996), supra). Preferably, the V₁ sequence that is used as a starting material or starting point for generating or designing the camelized Nanobody is preferably a V_{H} sequence from a mammal, more preferably the V_{H} sequence of a human being, such as a V_{H}3 sequence. However, it should be noted that such camelized Nanobodies of the invention can be obtained in any suitable manner known per se (i.e. as indicated under points (1)-(8) above) and thus are not strictly limited to polypeptides that have been obtained using a polypeptide that comprises a naturally occurring V_{H} domain as a starting material.

[0649] For example, again as further described herein, both “humanization” and “camelization” can be performed by providing a nucleotide sequence that encodes a naturally occurring V_{HH} domain or V_{H} domain, respectively, and then changing, in a manner known per se, one or more codons in said nucleotide sequence in such a way that the new nucleotide sequence encodes a “humanized” or “camelized” Nanobody of the invention, respectively. This nucleic acid can then be expressed in a manner known per se, so as to provide the desired Nanobody of the invention. Alternatively, based on the amino acid sequence of a naturally occurring V_{HH} domain or V_{H} domain, respectively, the amino acid sequence of the desired humanized or camelized Nanobody of the invention, respectively, can be designed and then synthesized de novo using techniques for peptide synthesis known per se. Also, based on the amino acid sequence or nucleotide sequence of a naturally occurring V_{HH} domain or V_{H} domain, respectively, a nucleotide sequence encoding the desired humanized or camelized Nanobody of the invention, respectively, can be designed and then synthesized de novo using techniques for nucleic acid synthesis known per se, after which the nucleic acid thus obtained can be expressed in a manner known per se, so as to provide the desired Nanobody of the invention.

[0650] Other suitable methods and techniques for obtaining the Nanobodies of the invention and/or nucleic acids encoding the same, starting from naturally occurring V_{H} sequences or preferably V_{HH} sequences, will be clear from the skilled person, and may for example comprise combining one or more parts of one or more naturally occurring V₁₄ sequences (such as one or more FR sequences and/or CDR sequences), one or more parts of one or more naturally occurring V_{HH} sequences (such as one or more FR sequences or CDR sequences), and/or one or more synthetic or semi-synthetic sequences, in a suitable manner, so as to provide a Nanobody of the invention or a nucleotide sequence or nucleic acid encoding the same (which may then be suitably expressed). Nucleotide sequences encoding framework sequences of V_{HH} sequences or Nanobodies will be clear to the skilled person based on the disclosure herein and/or the further prior art cited herein (and/or may alternatively be obtained by PCR starting from the nucleotide sequences obtained using the methods described herein) and may be suitably combined with nucleotide sequences that encode the desired CDR's (for example, by PCR assembly using overlapping primers), so as to provide a nucleic acid encoding a Nanobody of the invention.

[0651] As mentioned herein, Nanobodies may in particular be characterized by the presence of one or more “Hallmark residues” (as described herein) in one or more of the framework sequences.

[0652] Thus, according to one preferred, but non-limiting aspect of the invention, a Nanobody in its broadest sense can be generally defined as a polypeptide comprising:
[0653] a) an amino acid sequence that is comprised of four framework regions/sequences interrupted by three complementarity determining regions/sequences, in which the amino acid residue at position 108 according to the Kabat numbering is Q;
   and/or:
[0654] b) an amino acid sequence that is comprised of four framework regions/sequences interrupted by three complementarity determining regions/sequences, in which the amino acid residue at position 45 according to the Kabat numbering is a charged amino acid (as defined herein) or a cysteine residue, and position 44 is preferably an E;
   and/or:
[0655] c) an amino acid sequence that is comprised of four framework regions/sequences interrupted by three complementarity determining regions/sequences, in which the amino acid residue at position 103 according to the Kabat numbering is chosen from the group consisting of P, R and S, and is in particular chosen from the group consisting of R and S.

[0656] Thus, in a first preferred, but non-limiting aspect, a Nanobody of the invention may have the structure
[0657] FR1-CDR1-FR2-CDR2-FR3-CDR3-FR4
   in which FR1 to FR4 refer to framework regions 1 to 4, respectively, and in which CDR1 to CDR3 refer to the complementarity determining regions 1 to 3, respectively, and in which
[0658] a) the amino acid residue at position 108 according to the Kabat numbering is Q;
   and/or in which:
[0659] b) the amino acid residue at position 45 according to the Kabat numbering is a charged amino acid or a cysteine and the amino acid residue at position 44 according to the Kabat numbering is preferably E;
   and/or in which:
[0660] c) the amino acid residue at position 103 according to the Kabat numbering is chosen from the group consisting of P, R and S, and is in particular chosen from the group consisting of R and S;
   and in which:
[0661] d) CDR1, CDR2 and CDR3 are as defined herein, and are preferably as defined according to one of the preferred aspects herein, and are more preferably as defined according to one of the more preferred aspects herein.

[0662] In particular, a Nanobody in its broadest sense can be generally defined as a polypeptide comprising:
[0663] a) an amino acid sequence that is comprised of four framework regions/sequences interrupted by three complementarity determining regions/sequences, in which the amino acid residue at position 108 according to the Kabat numbering is Q;
   and/or:
[0664] b) an amino acid sequence that is comprised of four framework regions/sequences interrupted by three complementarity determining regions/sequences, in which the amino acid residue at position 44 according to the Kabat numbering is E and in which the amino acid residue at position 45 according to the Kabat numbering is an R;
   and/or:
[0665] c) an amino acid sequence that is comprised of four framework regions/sequences interrupted by three complementarity determining regions/sequences, in which the amino acid residue at position 103 according to the Kabat numbering is chosen from the group consisting of P, R and S, and is in particular chosen from the group consisting of R and S.

[0666] Thus, according to a preferred, but non-limiting aspect, a Nanobody of the invention may have the structure
[0667] FR1-CDR1-FR2-CDR2-FR3-CDR3-FR4
   in which FR1 to FR4 refer to framework regions 1 to 4, respectively, and in which CDR1 to CDR3 refer to the complementarity determining regions 1 to 3, respectively, and in which
[0668] a) the amino acid residue at position 108 according to the Kabat numbering is Q;
   and/or in which:
[0669] b) the amino acid residue at position 44 according to the Kabat numbering is E and in which the amino acid residue at position 45 according to the Kabat numbering is an R;
   and/or in which:
[0670] c) the amino acid residue at position 103 according to the Kabat numbering is chosen from the group consisting of P, R and S, and is in particular chosen from the group consisting of R and S;
   and in which:
[0671] d) CDR1, CDR2 and CDR3 are as defined herein, and are preferably as defined according to one of the preferred aspects herein, and are more preferably as defined according to one of the more preferred aspects herein.

[0672] In particular, a Nanobody against HER2 according to the invention may have the structure:
[0673] FR1-CDR1-FR2-CDR2-FR3-CDR3-FR4
   in which FR1 to FR4 refer to framework regions 1 to 4, respectively, and in which CDR1 to CDR3 refer to the complementarity determining regions 1 to 3, respectively, and in which
[0674] a) the amino acid residue at position 108 according to the Kabat numbering is Q;
   and/or in which:
[0675] b) the amino acid residue at position 44 according to the Kabat numbering is E and in which the amino acid residue at position 45 according to the Kabat numbering is an R;
   and/or in which:
[0676] c) the amino acid residue at position 103 according to the Kabat numbering is chosen from the group consisting of P, R and S, and is in particular chosen from the group consisting of R and S;
   and in which:
[0677] d) CDR1, CDR2 and CDR3 are as defined herein, and are preferably as defined according to one of the preferred aspects herein, and are more preferably as defined according to one of the more preferred aspects herein.

[0678] In particular, according to one preferred, but non-limiting aspect of the invention, a Nanobody can generally be defined as a polypeptide comprising an amino acid sequence that is comprised of four framework regions/sequences interrupted by three complementarity determining regions/sequences, in which;
[0679] a-1) the amino acid residue at position 44 according to the Kabat numbering is chosen from the group consisting of A, G, E, D, G, Q, R, S, L; and is preferably chosen from the group consisting of G, E or Q; and
[0680] a-2) the amino acid residue at position 45 according to the Kabat numbering is chosen from the group consisting of L, R or C; and is preferably chosen from the group consisting of L or R; and
[0681] a-3) the amino acid residue at position 103 according to the Kabat numbering is chosen from the group consisting of W, R or S; and is preferably W or R, and is most preferably W;
[0682] a-4) the amino acid residue at position 108 according to the Kabat numbering is Q;
   or in which:
[0683] b-1) the amino acid residue at position 44 according to the Kabat numbering is chosen from the group consisting of E and Q; and
[0684] b-2) the amino acid residue at position 45 according to the Kabat numbering is R; and
[0685] b-3) the amino acid residue at position 103 according to the Kabat numbering is chosen from the group consisting of W, R and S; and is preferably W;
[0686] b-4) the amino acid residue at position 108 according to the Kabat numbering is chosen from the group consisting of Q and L; and is preferably Q;
   or in which:
[0687] c-1) the amino acid residue at position 44 according to the Kabat numbering is chosen from the group consisting of A, G, E, D, Q, R, S and L; and is preferably chosen from the group consisting of G, E and Q; and
[0688] c-2) the amino acid residue at position 45 according to the Kabat numbering is chosen from the group consisting of L, R and C; and is preferably chosen from the group consisting of L and R; and
[0689] c-3) the amino acid residue at position 103 according to the Kabat numbering is chosen from the group consisting of P, R and S; and is in particular chosen from the group consisting of R and S; and
[0690] c-4) the amino acid residue at position 108 according to the Kabat numbering is chosen from the group consisting of Q and L; is preferably Q;
   and in which
[0691] d) CDR1, CDR2 and CDR3 are as defined herein, and are preferably as defined according to one of the preferred aspects herein, and are more preferably as defined according to one of the more preferred aspects herein.

[0692] Thus, in another preferred, but non-limiting aspect, a Nanobody of the invention may have the structure
[0693] FR1-CDR1-FR2-CDR2-FR3-CDR3-FR4
   in which FR1 to FR4 refer to framework regions 1 to 4, respectively, and in which CDR1 to CDR3 refer to the complementarity determining regions 1 to 3, respectively, and in which:
[0694] a-1) the amino acid residue at position 44 according to the Kabat numbering is chosen from the group consisting of A, G, E, D, G, Q, R, S, L; and is preferably chosen from the group consisting of G, E or Q;
   and in which:
[0695] a-2) the amino acid residue at position 45 according to the Kabat numbering is chosen from the group consisting of L, R or C; and is preferably chosen from the group consisting of L or R;
   and in which:
[0696] a-3) the amino acid residue at position 103 according to the Kabat numbering is chosen from the group consisting of W, R or S; and is preferably W or R, and is most preferably W;
   and in which
[0697] a-4) the amino acid residue at position 108 according to the Kabat numbering is Q;
   and in which:
[0698] d) CDR', CDR2 and CDR3 are as defined herein, and are preferably as defined according to one of the preferred aspects herein, and are more preferably as defined according to one of the more preferred aspects herein.

[0699] In another preferred, but non-limiting aspect, a Nanobody of the invention may have the structure
[0700] FR1-CDR1-FR2-CDR2-FR3-CDR3-FR4
   in which FR1 to FR4 refer to framework regions 1 to 4, respectively, and in which CDR1 to CDR3 refer to the complementarity determining regions 1 to 3, respectively, and in which:
[0701] b-1) the amino acid residue at position 44 according to the Kabat numbering is chosen from the group consisting of E and Q;
   and in which:
[0702] b-2) the amino acid residue at position 45 according to the Kabat numbering is R;
   and in which:
[0703] b-3) the amino acid residue at position 103 according to the Kabat numbering is chosen from the group consisting of W, R and S; and is preferably W;
   and in which:
[0704] b-4) the amino acid residue at position 108 according to the Kabat numbering is chosen from the group consisting of Q and L; and is preferably Q;
   and in which:
[0705] d) CDR1, CDR2 and CDR3 are as defined herein, and are preferably as defined according to one of the preferred aspects herein, and are more preferably as defined according to one of the more preferred aspects herein.

[0706] In another preferred, but non-limiting aspect, a Nanobody of the invention may have the structure
[0707] FR1-CDR1-FR2-CDR2-FR3-CDR3-FR4
   in which FR1 to FR4 refer to framework regions 1 to 4, respectively, and in which CDR1 to CDR3 refer to the complementarity determining regions 1 to 3, respectively, and in which:
[0708] c-1) the amino acid residue at position 44 according to the Kabat numbering is chosen from the group consisting of A, G, E, D, Q, R, S and L; and is preferably chosen from the group consisting of G, E and Q;
   and in which:
[0709] c-2) the amino acid residue at position 45 according to the Kabat numbering is chosen from the group consisting of L, R and C; and is preferably chosen from the group consisting of L and R;
   and in which:
[0710] c-3) the amino acid residue at position 103 according to the Kabat numbering is chosen from the group consisting of P, R and S; and is in particular chosen from the group consisting of R and S;
   and in which:
[0711] c-4) the amino acid residue at position 108 according to the Kabat numbering is chosen from the group consisting of Q and L; is preferably Q;
   and in which:
[0712] d) CDR1, CDR2 and CDR3 are as defined herein, and are preferably as defined according to one of the preferred aspects herein, and are more preferably as defined according to one of the more preferred aspects herein.

[0713] Two particularly preferred, but non-limiting groups of the Nanobodies of the invention are those according to a) above; according to (a-1) to (a-4) above; according to b) above; according to (b-1) to (b-4) above; according to (c) above; and/or according to (c-1) to (c-4) above, in which either:
[0714] i) the amino acid residues at positions 44-47 according to the Kabat numbering form the sequence GLEW (or a GLEW-like sequence as described herein) and the amino acid residue at position 108 is Q;
   or in which:
[0715] ii) the amino acid residues at positions 43-46 according to the Kabat numbering form the sequence KERE or KQRE (or a KERE-like sequence as described) and the amino acid residue at position 108 is Q or L, and is preferably Q.

[0716] Thus, in another preferred, but non-limiting aspect, a Nanobody of the invention may have the structure
[0717] FR1-CDR1-FR2-CDR2-FR3-CDR3-FR4
   in which FR1 to FR4 refer to framework regions 1 to 4, respectively, and in which CDR1 to CDR3 refer to the complementarity determining regions 1 to 3, respectively, and in which:
[0718] i) the amino acid residues at positions 44-47 according to the Kabat numbering form the sequence GLEW (or a GLEW-like sequence as defined herein) and the amino acid residue at position 108 is Q;
   and in which:
[0719] ii) CDR1, CDR2 and CDR3 are as defined herein, and are preferably as defined according to one of the preferred aspects herein, and are more preferably as defined according to one of the more preferred aspects herein.

[0720] In another preferred, but non-limiting aspect, a Nanobody of the invention may have the structure
[0721] FR1-CDR1-FR2-CDR2-FR3-CDR3-FR4
   in which FR1 to FR4 refer to framework regions 1 to 4, respectively, and in which CDR1 to CDR3 refer to the complementarity determining regions 1 to 3, respectively, and in which:
[0722] i) the amino acid residues at positions 43-46 according to the Kabat numbering form the sequence KERE or KQRE (or a KERE-like sequence) and the amino acid residue at position 108 is Q or L, and is preferably Q;
   and in which:
[0723] ii) CDR1, CDR2 and CDR3 are as defined herein, and are preferably as defined according to one of the preferred aspects herein, and are more preferably as defined according to one of the more preferred aspects herein.

[0724] In the Nanobodies of the invention in which the amino acid residues at positions 43-46 according to the Kabat numbering form the sequence KERE or KQRE, the amino acid residue at position 37 is most preferably F. In the Nanobodies of the invention in which the amino acid residues at positions 44-47 according to the Kabat numbering form the sequence GLEW, the amino acid residue at position 37 is chosen from the group consisting of Y, H, I, L, V or F, and is most preferably V.

[0725] Thus, without being limited hereto in any way, on the basis of the amino acid residues present on the positions mentioned above, the Nanobodies of the invention can generally be classified on the basis of the following three groups:
[0726] i) The “GLEW-group”: Nanobodies with the amino acid sequence GLEW at positions 44-47 according to the Kabat numbering and Q at position 108 according to the Kabat numbering. As further described herein, Nanobodies within this group usually have a V at position 37, and can have a W, P, R or S at position 103, and preferably have a W at position 103. The GLEW group also comprises some GLEW-like sequences such as those mentioned in Table A-3 below. More generally, and without limitation, Nanobodies belonging to the GLEW-group can be defined as Nanobodies with a G at position 44 and/or with a W at position 47, in which position 46 is usually E and in which preferably position 45 is not a charged amino acid residue and not cysteine;
[0727] ii) The “KERE-group”: Nanobodies with the amino acid sequence KERE or KQRE (or another KERE-like sequence) at positions 43-46 according to the Kabat numbering and Q or L at position 108 according to the Kabat numbering. As further described herein, Nanobodies within this group usually have a F at position 37, an L or F at position 47; and can have a W, P, R or S at position 103, and preferably have a W at position 103. More generally, and without limitation, Nanobodies belonging to the KERE-group can be defined as Nanobodies with a K, Q or R at position 44 (usually K) in which position 45 is a charged amino acid residue or cysteine, and position 47 is as further defined herein;
[0728] iii) The “103 P, R, S-group”: Nanobodies with a P, R or S at position 103. These Nanobodies can have either the amino acid sequence GLEW at positions 44-47 according to the Kabat numbering or the amino acid sequence KERE or KQRE at positions 43-46 according to the Kabat numbering, the latter most preferably in combination with an F at position 37 and an L or an F at position 47 (as defined for the KERE-group); and can have Q or L at position 108 according to the Kabat numbering, and preferably have Q.

[0729] Also, where appropriate, Nanobodies may belong to (i.e. have characteristics of) two or more of these classes. For example, one specifically preferred group of Nanobodies has GLEW or a GLEW-like sequence at positions 44-47; P, R or S (and in particular R) at position 103; and Q at position 108 (which may be humanized to L).

[0730] More generally, it should be noted that the definitions referred to above describe and apply to Nanobodies in the form of a native (i.e. non-humanized) V_{HH} sequence, and that humanized variants of these Nanobodies may contain other amino acid residues than those indicated above (i.e. one or more humanizing substitutions as defined herein). For example, and without limitation, in some humanized Nanobodies of the GLEW-group or the 103 P, R, S-group, Q at position 108 may be humanized to 108L. As already mentioned herein, other humanizing substitutions (and suitable combinations thereof) will become clear to the skilled person based on the disclosure herein. In addition, or alternatively, other potentially useful humanizing substitutions can be ascertained by comparing the sequence of the framework regions of a naturally occurring V_{HH} sequence with the corresponding framework sequence of one or more closely related human V_{H} sequences, after which one or more of the potentially useful humanizing substitutions (or combinations thereof) thus determined can be introduced into said V_{HH} sequence (in any manner known per se, as further described herein) and the resulting humanized V_{HH} sequences can be tested for affinity for the target, for stability, for ease and level of expression, and/or for other desired properties. In this way, by means of a limited degree of trial and error, other suitable humanizing substitutions (or suitable combinations thereof) can be determined by the skilled person based on the disclosure herein. Also, based on the foregoing, (the framework regions of) a Nanobody may be partially humanized or fully humanized.

[0731] Thus, in another preferred, but non-limiting aspect, a Nanobody of the invention may be a Nanobody belonging to the GLEW-group (as defined herein), and in which CDR1, CDR2 and CDR3 are as defined herein, and are preferably as defined according to one of the preferred aspects herein, and are more preferably as defined according to one of the more preferred aspects herein.

[0732] In another preferred, but non-limiting aspect, a Nanobody of the invention may be a Nanobody belonging to the KERE-group (as defined herein), and CDR1, CDR2 and CDR3 are as defined herein, and are preferably as defined according to one of the preferred aspects herein, and are more preferably as defined according to one of the more preferred aspects herein.

[0733] Thus, in another preferred, but non-limiting aspect, a Nanobody of the invention may be a Nanobody belonging to the 103 P, R, S-group (as defined herein), and in which CDR1, CDR2 and CDR3 are as defined herein, and are preferably as defined according to one of the preferred aspects herein, and are more preferably as defined according to one of the more preferred aspects herein.

[0734] Also, more generally and in addition to the 108Q, 43E/44R and 103 P, R, S residues mentioned above, the Nanobodies of the invention can contain, at one or more positions that in a conventional V_{H} domain would form (part of) the V_{H}/V_{L}, interface, one or more amino acid residues that are more highly charged than the amino acid residues that naturally occur at the same position(s) in the corresponding naturally occurring V_{H} sequence, and in particular one or more charged amino acid residues (as mentioned in Table A-2). Such substitutions include, but are not limited to, the GLEW-like sequences mentioned in Table A-3 below; as well as the substitutions that are described in the International Application WO 00/29004 for so-called “microbodies”, e.g. so as to obtain a Nanobody with Q at position 108 in combination with KLEW at positions 44-47. Other possible substitutions at these positions will be clear to the skilled person based upon the disclosure herein.

[0735] In one aspect of the Nanobodies of the invention, the amino acid residue at position 83 is chosen from the group consisting of L, M, S, V and W; and is preferably L.

[0736] Also, in one aspect of the Nanobodies of the invention, the amino acid residue at position 83 is chosen from the group consisting of R, K, N, E, G, I, T and Q; and is most preferably either K or E (for Nanobodies corresponding to naturally occurring V_{HH} domains) or R (for “humanized” Nanobodies, as described herein). The amino acid residue at position 84 is chosen from the group consisting of P, A, R, S, D T, and V in one aspect, and is most preferably P (for Nanobodies corresponding to naturally occurring V_{HH} domains) or R (for “humanized” Nanobodies, as described herein).

[0737] Furthermore, in one aspect of the Nanobodies of the invention, the amino acid residue at position 104 is chosen from the group consisting of G and D; and is most preferably G.

[0738] Collectively, the amino acid residues at positions 11, 37, 44, 45, 47, 83, 84, 103, 104 and 108, which in the Nanobodies are as mentioned above, will also be referred to herein as the “Hallmark Residues”. The Hallmark Residues and the amino acid residues at the corresponding positions of the most closely related human V_{H} domain, V_{H}3, are summarized in Table A-3.

[0739] Some especially preferred but non-limiting combinations of these Hallmark Residues as occur in naturally occurring V_{HH} domains are mentioned in Table A-4. For comparison, the corresponding amino acid residues of the human V_{H}3 called DP-47 have been indicated in italics.

TABLE A-3
Hallmark Residues in Nanobodies

| Position | Human V_{H}3 | Hallmark Residues |
|---|---|---|
| 11 | L, V; predominantly L | L, M, S, V, W; preferably L |
| 37 | V, I, F; usually V | F⁽¹⁾, Y, H, I, L or V, preferably F⁽¹⁾ |
| | | or Y |
| 44⁽⁸⁾ | G | G⁽²⁾, E⁽³⁾, A, D, Q, R, S, L; |
| | | preferably G⁽²⁾, E⁽³⁾ or Q; |
| | | most preferably G⁽²⁾ or E⁽³⁾ |
| 45⁽⁸⁾ | L | L⁽²⁾, R⁽³⁾, C, I, L, P, Q, V; preferably |
| | | L⁽²⁾ or R⁽³⁾ |
| 47⁽⁸⁾ | W, Y | W⁽²⁾, L⁽¹⁾ or F⁽¹⁾, A, G, I, M, R, S, V or |
| | | Y; preferably W⁽²⁾, L⁽¹⁾, F⁽¹⁾ or R |
| 83 | R or K; usually R | R, K⁽⁵⁾, N, E⁽⁵⁾, G, I, M, Q or T; |
| | | preferably K or R; most preferably K |
| 84 | A, T, D; | P⁽⁵⁾, A, L, R, S, T, D, V; preferably P |
| | predominantly A | |
| 103 | W | W⁽⁴⁾, P⁽⁶⁾, R⁽⁶⁾, S; preferably W |
| 104 | G | G or D; preferably G |
| 108 | L, M or T; | Q, L⁽⁷⁾ or R; preferably Q or L⁽⁷⁾ |
| | predominantly L | |

Notes:
⁽¹⁾In particular, but not exclusively, in combination with KERE or KQRE at positions 43-46.
⁽²⁾Usually as GLEW at positions 44-47.
⁽³⁾Usually as KERE or KQRE at positions 43-46, e.g. as KEREL, KEREF, KQREL, KQREF or KEREG at positions 43-47. Alternatively, also sequences such as TERE (for example TEREL), KECE (for example KECEL or KECER), RERE (for example REREG), QERE (for example QEREG), KGRE (for example KGREG), KDRE (for example KDREV) are possible. Some other possible, but less preferred sequences include for example DECKL and NVCEL.
⁽⁴⁾With both GLEW at positions 44-47 and KERE or KQRE at positions 43-46.
⁽⁵⁾Often as KP or EP at positions 83-84 of naturally occurring V_{HH} domains.
⁽⁶⁾In particular, but not exclusively, in combination with GLEW at positions 44-47.
⁽⁷⁾With the proviso that when positions 44-47 are GLEW, position 108 is always Q in (non-humanized) V_{HH} sequences that also contain a W at 103.
⁽⁸⁾The GLEW group also contains GLEW-like sequences at positions 44-47, such as for example GVEW, EPEW, GLER, DQEW, DLEW, GIEW, ELEW, GPEW, EWLP, GPER, GLER and ELEW.

TABLE A-4
Some preferred but non-limiting combinations of Hallmark Residues in naturally occurring Nanobodies.
For humanization of these combinations, reference is made to the specification.

| | 11 | 37 | 44 | 45 | 47 | 83 | 84 | 103 | 104 | 108 |
|---|---|---|---|---|---|---|---|---|---|---|
| DP-47 (human) | M | V | G | L | W | R | A | W | G | L |
| “KERE” group | L | F | E | R | L | K | P | W | G | Q |
| | L | F | E | R | F | E | P | W | G | Q |
| | L | F | E | R | F | K | P | W | G | Q |
| | L | Y | Q | R | L | K | P | W | G | Q |
| | L | F | L | R | V | K | P | Q | G | Q |
| | L | F | Q | R | L | K | P | W | G | Q |
| | L | F | E | R | F | K | P | W | G | Q |
| “GLEW” group | L | V | G | L | W | K | S | W | G | Q |
| | M | V | G | L | W | K | P | R | G | Q |

[0740] In the Nanobodies, each amino acid residue at any other position than the Hallmark Residues can be any amino acid residue that naturally occurs at the corresponding position (according to the Kabat numbering) of a naturally occurring V_{HH} domain.

[0741] Such amino acid residues will be clear to the skilled person. Tables A-5 to A-8 mention some non-limiting residues that can be present at each position (according to the Kabat numbering) of the FR1, FR2, FR3 and FR4 of naturally occurring V_{HH} domains. For each position, the amino acid residue that most frequently occurs at each position of a naturally occurring V_{HH} domain (and which is the most preferred amino acid residue for said position in a Nanobody) is indicated in bold; and other preferred amino acid residues for each position have been underlined (note: the number of amino acid residues that are found at positions 26-30 of naturally occurring V_{HH} domains supports the hypothesis underlying the numbering by Chothia (supra) that the residues at these positions already form part of CDR1).

[0742] In Tables A-5-A-8, some of the non-limiting residues that can be present at each position of a human V_{H}3 domain have also been mentioned. Again, for each position, the amino acid residue that most frequently occurs at each position of a naturally occurring human V_{H}3 domain is indicated in bold; and other preferred amino acid residues have been underlined.

[0743] For reference only, Tables A-5-A-8 also contain data on the V_{HH} entropy (“V_{HH} Ent.”) and V_{HH} variability (“V_{HH} Var.”) at each amino acid position for a representative sample of 1118 V_{HH} sequences (data kindly provided by David Lutje Hulsing and Prof. Theo Verrips of Utrecht University). The values for the V_{HH} entropy and the V_{HH} variability provide a measure for the variability and degree of conservation of amino acid residues between the 1118 V_{HH} sequences analyzed: low values (i.e. <1, such as <0.5) indicate that an amino acid residue is highly conserved between the V_{HH} sequences (i.e. little variability). For example, the G at position 8 and the G at position 9 have values for the V_{HH} entropy of 0.1 and 0 respectively, indicating that these residues are highly conserved and have little variability (and in case of position 9 is G in all 1118 sequences analysed), whereas for residues that form part of the CDR's generally values of 1.5 or more are found (data not shown). Note that (1) the amino acid residues listed in the second column of Tables A-5-A-8 are based on a bigger sample than the 1118 V_{HH} sequences that were analysed for determining the V_{HH} entropy and V_{HH} variability referred to in the last two columns; and (2) the data represented below support the hypothesis that the amino acid residues at positions 27-30 and maybe even also at positions 93 and 94 already form part of the CDR's (although the invention is not limited to any specific hypothesis or explanation, and as mentioned above, herein the numbering according to Kabat is used). For a general explanation of sequence entropy, sequence variability and the methodology for determining the same, see Oliveira et al., PROTEINS: Structure, Function and Genetics, 52: 544-552 (2003).

TABLE A-5
Non-limiting examples of amino acid residues in FR1
(for the footnotes, see the footnotes to Table A-3)

| | Amino acid residue(s): | | V_{HH} | V_{HH} |
|---|---|---|---|---|
| Pos. | Human V_{H}3 | Camelid V_{HH}'s | Ent. | Var. |
| 1 | E, Q | Q, A, E | — | — |
| 2 | V | V | 0.2 | 1 |
| 3 | Q | Q, K | 0.3 | 2 |
| 4 | L | L | 0.1 | 1 |
| 5 | V, L | Q, E, L, V | 0.8 | 3 |
| 6 | E | E, D, Q, A | 0.8 | 4 |
| 7 | S, T | S, F | 0.3 | 2 |
| 8 | G, R | G | 0.1 | 1 |
| 9 | G | G | 0 | 1 |
| 10 | G, V | G, D, R | 0.3 | 2 |
| 11 | Hallmark residue: L, M, S, V, W; preferably L | | 0.8 | 2 |
| 12 | V, I | V, A | 0.2 | 2 |
| 13 | Q, K, R | Q, E, K, P, R | 0.4 | 4 |
| 14 | P | A, Q, A, G, P, S, T, V | 1 | 5 |
| 15 | G | G | 0 | 1 |
| 16 | G, R | G, A, E, D | 0.4 | 3 |
| 17 | S | S, F | 0.5 | 2 |
| 18 | L | L, V | 0.1 | 1 |
| 19 | R, K | R, K, L, N, S, T | 0.6 | 4 |
| 20 | L | L, F, I, V | 0.5 | 4 |
| 21 | S | S, A, F, T | 0.2 | 3 |
| 22 | C | C | 0 | 1 |
| 23 | A, T | A, D, E, P, S, T, V | 1.3 | 5 |
| 24 | A | A, I, L, S, T, V | 1 | 6 |
| 25 | S | S, A, F, P, T | 0.5 | 5 |
| 26 | G | G, A, D, E, R, S, T, V | 0.7 | 7 |
| 27 | F | S, F, R, L, P, G, N, | 2.3 | 13 |
| 28 | T | N, T, E, D, S, I, R, A, G, R, F, Y | 1.7 | 11 |
| 29 | F, V | F, L, D, S, I, G, V, A | 1.9 | 11 |
| 30 | S, D, G | N, S, E, G, A, D, M, T | 1.8 | 11 |

TABLE A-6
Non-limiting examples of amino acid residues in FR2
(for the footnotes, see the footnotes to Table A-3)

| | | |
|---|---|---|
| Amino acid residue(s): | V_{HH} | V_{HH} |

| Pos. | Human V_{H}3 | Camelid V_{HH}'s | Ent. | Var. |
|---|---|---|---|---|
| 36 | W | W | 0.1 | 1 |

| | | | |
|---|---|---|---|
| 37 | Hallmark residue: F⁽¹⁾, H, I, L, | 1.1 | 6 |
| | Y or V, preferably F⁽¹⁾ or Y | | |

| | | | | |
|---|---|---|---|---|
| 38 | R | R | 0.2 | 1 |
| 39 | Q | Q, H, P, R | 0.3 | 2 |
| 40 | A | A, F, G, L, P, T, V | 0.9 | 7 |
| 41 | P, S, T | P, A, L, S | 0.4 | 3 |
| 42 | G | G, E | 0.2 | 2 |
| 43 | K | K, D, E, N, Q, R, T, V | 0.7 | 6 |

| | | | |
|---|---|---|---|
| 44 | Hallmark residue: G⁽²⁾, E⁽³⁾, A, D, Q, | 1.3 | 5 |
| | R, S, L; preferably G⁽²⁾, E⁽³⁾ or | | |
| | Q; most preferably G⁽²⁾ or E⁽³⁾ | | |
| 45 | Hallmark residue: L⁽²⁾, R⁽³⁾, C, I, L, | 0.6 | 4 |
| | P, Q, V; preferably L⁽²⁾ or R⁽³⁾ | | |

| | | | | |
|---|---|---|---|---|
| 46 | E, V | E, D, K, Q, V | 0.4 | 2 |

| | | | |
|---|---|---|---|
| 47 | Hallmark residue: W⁽²⁾, L⁽¹⁾ or | 1.9 | 9 |
| | F⁽¹⁾, A, G, I, M, R, S, V or Y; | | |
| | preferably W⁽²⁾, L⁽¹⁾, F⁽¹⁾ or R | | |

| | | | | |
|---|---|---|---|---|
| 48 | V | V, I, L | 0.4 | 3 |
| 49 | S, A, G | A, S, G, T, V | 0.8 | 3 |

TABLE A-7
Non-limiting examples of amino acid residues in FR3
(for the footnotes, see the footnotes to Table A-3)

| | Amino acid residue(s): | | V_{HH} | V_{HH} |
|---|---|---|---|---|
| Pos. | Human V_{H}3 | Camelid V_{HH}'s | Ent. | Var. |
| 66 | R | R | 0.1 | 1 |
| 67 | F | F, L, V | 0.1 | 1 |
| 68 | T | T, A, N, S | 0.5 | 4 |
| 69 | I | I, L, M, V | 0.4 | 4 |
| 70 | S | S, A, F, T | 0.3 | 4 |
| 71 | R | R, G, H, I, L, K, Q, S, T, W | 1.2 | 8 |
| 72 | D, E | D, E, G, N, V | 0.5 | 4 |
| 73 | N, D, G | N, A, D, F, I, K, L, R, S, T, V, Y | 1.2 | 9 |
| 74 | A, S | A, D, G, N, P, S, T, V | 1 | 7 |
| 75 | K | K, A, E, K, L, N, Q, R | 0.9 | 6 |
| 76 | N, S | N, D, K, R, S, T, Y | 0.9 | 6 |
| 77 | S, T, I | T, A, E, I, M, P, S | 0.8 | 5 |
| 78 | L, A | V, L, A, F, G, I, M | 1.2 | 5 |
| 79 | Y, H | Y, A, D, F, H, N, S, T | 1 | 7 |
| 80 | L | L, F, V | 0.1 | 1 |
| 81 | Q | Q, E, I, L, R, T | 0.6 | 5 |
| 82 | M | M, I, L, V | 0.2 | 2 |
| 82a | N, G | N, D, G, H, S, T | 0.8 | 4 |
| 82b | S | S, N, D, G, R, T | 1 | 6 |
| 82c | L | L, P, V | 0.1 | 2 |
| 83 | Hallmark residue: R, K⁽⁵⁾, N, E⁽⁵⁾, G, I, M, | | 0.9 | 7 |
| | Q or T; preferably K or R; most preferably K | | | |
| 84 | Hallmark residue: P⁽⁵⁾, A, D, L, R, S, T, V; | | 0.7 | 6 |
| | preferably P | | | |
| 85 | E, G | E, D, G, Q | 0.5 | 3 |
| 86 | D | D | 0 | 1 |
| 87 | T, M | T, A, S | 0.2 | 3 |
| 88 | A | A, G, S | 0.3 | 2 |
| 89 | V, L | V, A, D, I, L, M, N, R, T | 1.4 | 6 |
| 90 | Y | Y, F | 0 | 1 |
| 91 | Y, H | Y, D, F, H, L, S, T, V | 0.6 | 4 |
| 92 | C | C | 0 | 1 |
| 93 | A, K, T | A, N, G, H, K, N, R, S, T, V, Y | 1.4 | 10 |
| 94 | K, R, T | A, V, C, F, G, I, K, L, R, S or T | 1.6 | 9 |

TABLE A-8
Non-limiting examples of amino acid residues in FR4
(for the footnotes, see the footnotes to Table A-3)

| | | |
|---|---|---|
| Amino acid residue(s): | V_{HH} | V_{HH} |

| | | | | |
|---|---|---|---|---|
| Pos. | Human V_{H}3 | Camelid V_{HH}'s | Ent. | Var. |

| | | | |
|---|---|---|---|
| 103 | Hallmark residue: W⁽⁴⁾, P⁽⁶⁾, | 0.4 | 2 |
| | R⁽⁶⁾, S; preferably W | | |
| 104 | Hallmark residue: G or D; | 0.1 | 1 |
| | preferably G | | |

| | | | | |
|---|---|---|---|---|
| 105 | Q, R | Q, E, K, P, R | 0.6 | 4 |
| 106 | G | G | 0.1 | 1 |
| 107 | T | T, A, I | 0.3 | 2 |

| | | | |
|---|---|---|---|
| 108 | Hallmark residue: Q, L⁽⁷⁾ or | 0.4 | 3 |
| | R; preferably Q or L⁽⁷⁾ | | |

| | | | | |
|---|---|---|---|---|
| 109 | V | V | 0.1 | 1 |
| 110 | T | T, I, A | 0.2 | 1 |
| 111 | V | V, A, I | 0.3 | 2 |
| 112 | S | S, F | 0.3 | 1 |
| 113 | S | S, A, L, P, T | 0.4 | 3 |

[0744] Thus, in another preferred, but not limiting aspect, a Nanobody of the invention can be defined as an amino acid sequence with the (general) structure
[0745] FR1-CDR1-FR2-CDR2-FR3-CDR3-FR4

[0746] in which FR1 to FR4 refer to framework regions 1 to 4, respectively, and in which CDR1 to CDR3 refer to the complementarity determining regions 1 to 3, respectively, and in which:
[0747] i) one or more of the amino acid residues at positions 11, 37, 44, 45, 47, 83, 84, 103, 104 and 108 according to the Kabat numbering are chosen from the Hallmark residues mentioned in Table A-3;
   and in which:
[0748] ii) CDR1, CDR2 and CDR3 are as defined herein, and are preferably as defined according to one of the preferred aspects herein, and are more preferably as defined according to one of the more preferred aspects herein.

[0749] The above Nanobodies may for example be V_{HH} sequences or may be humanized Nanobodies. When the above Nanobody sequences are V_{HH} sequences, they may be suitably humanized, as further described herein. When the Nanobodies are partially humanized Nanobodies, they may optionally be further suitably humanized, again as described herein.

[0750] In particular, a Nanobody of the invention can be an amino acid sequence with the (general) structure
[0751] FR1-CDR1-FR2-CDR2-FR3-CDR3-FR4

[0752] in which FR1 to FR4 refer to framework regions 1 to 4, respectively, and in which. CDR1 to CDR3 refer to the complementarity determining regions 1 to 3, respectively, and in which:
[0753] i) (preferably) one or more of the amino acid residues at positions 11, 37, 44, 45, 47, 83, 84, 103, 104 and 108 according to the Kabat numbering are chosen from the Hallmark residues mentioned in Table A-3 (it being understood that V_{HH} sequences will contain one or more Hallmark residues; and that partially humanized Nanobodies will usually, and preferably, [still] contain one or more Hallmark residues [although it is also within the scope of the invention to provide—where suitable in accordance with the invention—partially humanized Nanobodies in which all Hallmark residues, but not one or more of the other amino acid residues, have been humanized]; and that in fully humanized Nanobodies, where suitable in accordance with the invention, all amino acid residues at the positions of the Hallmark residues will be amino acid residues that occur in a human V_{H}3 sequence. As will be clear to the skilled person based on the disclosure herein that such V_{HH} sequences, such partially humanized Nanobodies with at least one Hallmark residue, such partially humanized Nanobodies without Hallmark residues and such fully humanized Nanobodies all form aspects of this invention);
   and in which:
[0754] ii) said amino acid sequence has at least 80% amino acid identity with at least one of the amino acid sequences of SEQ ID NO's: 1 to 22, in which for the purposes of determining the degree of amino acid identity, the amino acid residues that form the CDR sequences (indicated with X in the sequences of SEQ ID NO's: 1 to 22) are disregarded;
   and in which:
[0755] iii) CDR1, CDR2 and CDR3 are as defined herein, and are preferably as defined according to one of the preferred aspects herein, and are more preferably as defined according to one of the more preferred aspects herein.

[0756] The above Nanobodies may for example be V_{HH} sequences or may be humanized Nanobodies. When the above Nanobody sequences are V_{HH} sequences, they may be suitably humanized, as further described herein. When the Nanobodies are partially humanized Nanobodies, they may optionally be further suitably humanized, again as described herein.

TABLE A-9

Representative amino acid sequences for Nanobodies of the KERE, GLEW and P,
R, S 1.03 group.
The CDR's are indicated with XXXX

| | | |
|---|---|---|
| KERE sequence no. 1 | SEQ ID NO: 1 | EVQLVESGGGLVQPGGSLRLSCAASGIPFSXXXXXWFRQAPGKQRDSVAXXXXXRFTISRDNA |
| | | KNTVYLQMNSLKPEDTAVYRCYFXXXXXWGQGTQVTVSS |
| KERE sequence no. 2 | SEQ ID NO: 2 | QVKLEESGGGLVQAGGSLRLSCVGSGRTESXXXXXWFRLAPGKEREFVAXXXXXRFTISRDTA |
| | | SNRGYLHMNNLTPEDTAVYYCAAXXXXXWGQGTQVTVSS |
| KERE sequence no. 3 | SEQ ID NO: 3 | AVQLVDSGGGLVQAGDSLKLSCALTGGAFTXXXXXWERQTPGREREFVAXXXXXRFTI |
| | | SRDNAKNMVYLRMNSLIPEDAAVYSCAAXXXXXWGQGTLVTVSS |
| KERE sequence no. 4 | SEQ ID NO: 4 | QVQLVESGGGLVEAGGSLRLSCTASESPFRXXXXXWFRQTSGQEREFVAXXXXXRFTI |
| | | SRDDAKNTVWLHGSTLKPEDTAVYYCAAXXXXXWGQGTQVTVSS |
| KERE sequence no. 5 | SEQ ID NO: 5 | AVQLVESGGGLVQGGGSLRLACAASERIFDXXXXXWYRQGPGNERELVAXXXXXRFTI |
| | | SMDYTKQTVYLHMNSLRPEDTGLYYCKIXXXXXWGQGTQVTVSS |
| KERE sequence no. 6 | SEQ ID NO: 6 | DVKFVESGGGLVQAGGSLRLSCVASGFNFDXXXXXWFRQAPGKEREEVAXXXXXRFT |
| | | ISSEKDKNSVYLQMNSLKPEDTALYICAGXXXXXWGRGTQVTVSS |
| KERE sequence no. 7 | SEQ ID NO: 7 | QVRLAESGGGLVQSGGSLRLSCVASGSTYTXXXXXWYRQYPGKQRALVAXXXXXRFT |
| | | IARDSTKDTFCLQMNNLKPEDTAVYYCYAXXXXXWGQGTQVTVSS |
| KERE sequence no. 8 | SEQ ID NO: 8 | EVQLVESGGGLVQAGGSLRLSCAASGFTSDXXXXXWFRQAPGKPREGVSXXXXXRFT |
| | | ISTDNAKNTVHLLMNRVNAEDTALYYCAVXXXXXWGRGTRVTVSS |
| KERE sequence no. 9 | SEQ ID NO: 9 | QVQLVESGGGLVQPGGSLRLSCQASGDISTXXXXXWYRQVPGKLREFVAXXXXXRFTI |
| | | SGDNAKRAIYLQMNNLKPDDTAVYYCNRXXXXXWGQGTQVTVSP |
| KERE sequence no. 10 | SEQ ID NO: 10 | QVPVVESGGGLVQAGDSLRLFCAVPSFTSTXXXXXWFRQAPGKEREFVAXXXXXRFTI |
| | | SRNATKNTLTLRMDSLKPEDTAVYYCAAXXXXXWGQGTQVTVSS |
| KERE sequence no. 11 | SEQ ID NO: 11 | EVQLVESGGGLVQAGDSLRLFCTVSGGTASXXXXXWFRQAPGEKREFVAXXXXXRFTI |
| | | ARENAGNMVYLQMNNLKPDDTALYTCAAXXXXXWGRGTQVTVSS |
| KERE sequence no. 12 | SEQ ID NO: 12 | AVQLVESGGDSVQPGDSQTLSCAASGRTNSXXXXXWFRQAPGKERVFLAXXXXXRFT |
| | | ISRDSAKNMMYLQMNNLKPQDTAVYYCAAXXXXXWGQGTQVTVSS |
| KERE sequence no. 13 | SEQ ID NO: 13 | AVQLVESGGGLVQAGGSLRLSCVVSGLTSSXXXXXWFRQTPWQERDFVAXXXXXRFT |
| | | ISRDNYKDTVLLEMNFLKPEDTAIYYCAAXXXXXWGQGTQVTVSS |
| KERE sequence no. 14 | SEQ ID NO: 14 | AVQLVESGGGLVQAGASLRLSCATSTRTLDXXXXXWFRQAPGRDREFVAXXXXXRFT |
| | | VSRDSAENTVALQMNSLKPEDTAVYYCAAXXXXXWGQGTRVTVSS |
| KERE sequence no. 15 | SEQ ID NO: 15 | QVQLVESGGGLVQPGGSLRLSCTVSRLTAHXXXXXWFRQAPGKEREAVSXXXXXRFTI |
| | | SRDYAGNTAFLQMDSLKPEDTGVYYCATXXXXXWGQGTQVTVSS |
| KERE sequence no. 16 | SEQ ID NO: 16 | EVQLVESGGELVQAGGSLKLSCTASGRNFVXXXXXWFRRAPGKEREFVAXXXXXRFT |
| | | VSRDNGKNTAYLRMNSLKPEDTADYYCAVXXXXXLGSGTQVTVSS |
| GLEW sequence no. 1 | SEQ ID NO: 17 | AVQLVESGGGLVQPGGSLRLSCAASGFTFSXXXXXWVRQAPGKVLEWVSXXXXXRFT |
| | | SRDNAKNTLYLQMNSLKPEDTAVYYCVKXXXXXGSQGTQVTVSS |
| GLEW sequence no. 2 | SEQ ID NO: 18 | EVQLVESGGGLVQPGGSLRLSCVCVSSGCTXXXXXWVRQAPGKAEEWVSXXXXXRF |
| | | KISRDNAKKTLYLQMNSLGPEDTAMYYCQRXXXXXRGQGTQVTVSS |
| GLEW sequence no. 3 | SEQ ID NO: 19 | EVQLVESGGGLALPGGSLTLSCVFSGSTFSXXXXXWVRHTPGKAEEWVSXXXXXRFTI |
| | | SRDNAKNTLYLEMNSLSPEDTAMYYCGRXXXXXRSKGIQVTVSS |
| P, R, S 103 sequence no. 1 | SEQ ID NO: 20 | AVQLVESGGGLVQAGGSLRLSCAASGRTFSXXXXXWFRQAPGKEREFVAXXXXXRFTI |
| | | SRDNAKNTVYLQMNSLKPEDTAVYYCAAXXXXXRGQGTQVTVSS |
| P, R, S 103 sequence no. 2 | SEQ ID NO: 21 | DVQLVESGGDLVQPGGSLRLSCAASGFSFDXXXXXWLRQTPGKGLEWVGXXXXXRFT |
| | | ISRDNAKNMLYLHLNNLKSEDTAVYYCRRXXXXXLGQGTQVTVSS |
| P, R, S 103 sequence no. 3 | SEQ ID NO: 22 | EVQLVESGGGLVQPGGSLRLSCVCVSSGCTXXXXXWVRQAPGKAEEWVSXXXXXRF |
| | | KISRDNAKKTLYLQMNSLGPEDTAMYYCQRXXXXXRGQGTQVTVSS |

[0757] In particular, a Nanobody of the invention of the KERE group can be an amino acid sequence with the (general) structure
[0758] FR1-CDR1-FR2-CDR2-FR3-CDR3-FR4
   in which:
[0759] i) the amino acid residue at position 45 according to the Kabat numbering is a charged amino acid (as defined herein) or a cysteine residue, and position 44 is preferably an E;
   and in which:
[0760] ii) FR1 is an amino acid sequence that has at least 80% amino acid identity with at least one of the following amino acid sequences:

TABLE A-10
Representative FW1 sequences for Nanobodies of the KERE-group.

| | | |
|---|---|---|
| KERE FW1 sequence no. 1 | SEQ ID NO: 23 | QVQRVESGGGLVQAGGSLRLSCAASGRTSS |
| KERE FW1 sequence no. 2 | SEQ ID NO: 24 | QVQLVESGGGLVQTGDSLSLSCSASGRTFS |
| KERE FW1 sequence no. 3 | SEQ ID NO: 25 | QVKLEESGGGLVQAGDSLRLSCAATGRAFG |
| KERE FW1 sequence no. 4 | SEQ ID NO: 26 | AVQLVESGGGLVQPGESLGLSCVASGRDFV |
| KERE FW1 sequence no. 5 | SEQ ID NO: 27 | EVQLVESGGGLVQAGGSLRLSCEVLGRTAG |
| KERE FW1 sequence no. 6 | SEQ ID NO: 28 | QVQLVESGGGWVQPGGSLRLSCAASETILS |
| KERE FW1 sequence no. 7 | SEQ ID NO: 29 | QVQLVESGGGTVQPGGSLNLSCVASGNTFN |
| KERE FW1 sequence no. 8 | SEQ ID NO: 30 | EVQLVESGGGLAQPGGSLQLSCSAPGFTLD |
| KERE FW1 sequence no. 9 | SEQ ID NO: 31 | AQELEESGGGLVQAGGSLRLSCAASGRTFN |

and in which:
[0761] iii) FR2 is an amino acid sequence that has at least 80% amino acid identity with at least one of the following amino acid sequences:

TABLE A-11
Representative FW2 sequences for Nanobodies
of the KERE-group.

| | | |
|---|---|---|
| KERE FW2 | SEQ ID NO: 41 | WFRQAPGKEREFVA |
| sequence no. 1 | | |
| KERE FW2 | SEQ ID NO: 42 | WFRQTPGREREFVA |
| sequence no. 2 | | |
| KERE FW2 | SEQ ID NO: 43 | WYRQAPGKQREMVA |
| sequence no. 3 | | |
| KERE FW2 | SEQ ID NO: 44 | WYRQGPGKQRELVA |
| sequence no. 4 | | |
| KERE FW2 | SEQ ID NO: 45 | WIRQAPGKEREGVS |
| sequence no. 5 | | |
| KERE FW2 | SEQ ID NO: 46 | WFREAPGKEREGIS |
| sequence no. 6 | | |
| KERE FW2 | SEQ ID NO: 47 | WYRQAPGKERDLVA |
| sequence no. 7 | | |
| KERE FW2 | SEQ ID NO: 48 | WFRQAPGKQREEVS |
| sequence no. 8 | | |
| KERE FW2 | SEQ ID NO: 49 | WFRQPPGKVREFVG |
| sequence no. 9 | | |

and in which:
[0762] iv) FR3 is an amino acid sequence that has at least 80% amino acid identity with at least one of the following amino acid sequences:

TABLE A-12
Representative FW3 sequences for Nanobodies
of the KERE-group.

| | | |
|---|---|---|
| KERE FW3 | SEQ ID NO: 50 | RFTISRDNAKNTVYLQMNSL |
| sequence no. 1 | | KPEDTAVYRCYF |
| KERE FW3 | SEQ ID NO: 51 | RFAISRDNNKNTGYLQMNSL |
| sequence no. 2 | | EPEDTAVYYCAA |
| KERE FW3 | SEQ ID NO: 52 | RFTVARNNAKNTVNLEMNSL |
| sequence no. 3 | | KPEDTAVYYCAA |
| KERE FW3 | SEQ ID NO: 53 | RFTISRDIAKNTVDLLMNNL |
| sequence no. 4 | | EPEDTAVYYCAA |
| KERE FW3 | SEQ ID NO: 54 | RLTISRDNAVDTMYLQMNSL |
| sequence no. 5 | | KPEDTAVYYCAA |
| KERE FW3 | SEQ ID NO: 55 | RFTISRDNAKNTVYLQMDNV |
| sequence no. 6 | | KPEDTAIYYCAA |
| KERE FW3 | SEQ ID NO: 56 | RFTISKDSGKNTVYLQMTSL |
| sequence no. 7 | | KPEDTAVYYCAT |
| KERE FW3 | SEQ ID NO: 57 | RFTISRDSAKNMMYLQMNNL |
| sequence no. 8 | | KPQDTAVYYCAA |
| KERE FW3 | SEQ ID NO: 58 | RFTISRENDKSTVYLQLNSL |
| sequence no. 9 | | KPEDTAVYYCAA |
| KERE FW3 | SEQ ID NO: 59 | RFTISRDYAGNTAYLQMNSL |
| sequence no. 10 | | KPEDTGVYYCAT |

and in which:
[0763] v) FR4 is an amino acid sequence that has at least 80% amino acid identity with at least one of the following amino acid sequences:

TABLE A-13
Representative FW4 sequences for Nanobodies
of the KERE-group.

| | | |
|---|---|---|
| KERE FW4 sequence no. 1 | SEQ ID NO: 60 | WGQGTQVTVSS |
| KERE FW4 sequence no. 2 | SEQ ID NO: 61 | WGKGTLVTVSS |
| KERE FW4 sequence no. 3 | SEQ ID NO: 62 | RGQGTRVTVSS |
| KERE FW4 sequence no. 4 | SEQ ID NO: 63 | WGLGTQVTISS |

and in which:
[0764] vi) CDR1, CDR2 and CDR3 are as defined herein, and are preferably as defined according to one of the preferred aspects herein, and are more preferably as defined according to one of the more preferred aspects herein.

[0765] In the above Nanobodies, one or more of the further Hallmark residues are preferably as described herein (for example, when they are V_{HH} sequences or partially humanized Nanobodies).

[0766] Also, the above Nanobodies may for example be V_{HH} sequences or may be humanized Nanobodies. When the above Nanobody sequences are V_{HH} sequences, they may be suitably humanized, as further described herein. When the Nanobodies are partially humanized Nanobodies, they may optionally be further suitably humanized, again as described herein.

[0767] With regard to framework 1, it will be clear to the skilled person that, when an amino acid sequence as outlined above is generated by expression of a nucleotide sequence, the first four amino acid sequences (i.e. amino acid residues 1-4 according to the Kabat numbering) may often be determined by the primer(s) that have been used to generate said nucleic acid. Thus, for determining the degree of amino acid identity, the first four amino acid residues are preferably disregarded.

[0768] Also, with regard to framework 1, and although amino acid positions 27 to 30 are according to the Kabat numbering considered to be part of the framework regions (and not the CDR's), it has been found by analysis of a database of more than 1000 V_{HH} sequences that the positions 27 to 30 have a variability (expressed in terms of V_{HH} entropy and V_{HH} variability—see Tables A-5 to A-8) that is much greater than the variability on positions 1 to 26. Because of this, for determining the degree of amino acid identity, the amino acid residues at positions 27 to 30 are preferably also disregarded.

[0769] In view of this, a Nanobody of the KERE class may be an amino acid sequence that is comprised of four framework regions/sequences interrupted by three complementarity determining regions/sequences, in which:
[0770] i) the amino acid residue at position 45 according to the Kabat numbering is a charged amino acid (as defined herein) or a cysteine residue, and position 44 is preferably an E;
   and in which:
[0771] ii) FR1 is an amino acid sequence that, on positions 5 to 26 of the Kabat numbering, has at least 80% amino acid identity with at least one of the following amino acid sequences:

TABLE A-14
Representative FW1 sequences
(amino acid residues 5 to 26) for
Nanobodies of the KERE-group.

| | | |
|---|---|---|
| KERE FW1 | SEQ ID NO: 32 | VESGGGLVQPGGSLRLSCAASG |
| sequence | | |
| no. 10 | | |
| KERE FW1 | SEQ ID NO: 33 | VDSGGGLVQAGDSLKLSCALTG |
| sequence | | |
| no. 11 | | |
| KERE FW1 | SEQ ID NO: 34 | VDSGGGLVQAGDSLRLSCAASG |
| sequence | | |
| no. 12 | | |
| KERE FW1 | SEQ ID NO: 35 | VDSGGGLVEAGGSLRLSCQVSE |
| sequence | | |
| no. 13 | | |
| KERE FW1 | SEQ ID NO: 36 | QDSGGGSVQAGGSLKLSCAASG |
| sequence | | |
| no. 14 | | |
| KERE FW1 | SEQ ID NO: 37 | VQSGGRLVQAGDSLRLSCAASE |
| sequence | | |
| no. 15 | | |
| KERE FW1 | SEQ ID NO: 38 | VESGGTLVQSGDSLKLSCASST |
| sequence | | |
| no. 16 | | |
| KERE FW1 | SEQ ID NO: 39 | MESGGDSVQSGGSLTLSCVASG |
| sequence | | |
| no. 17 | | |
| KERE FW1 | SEQ ID NO: 40 | QASGGGLVQAGGSLRLSCSASV |
| sequence | | |
| no. 18 | | |

and in which:
[0772] iii) FR2, FR3 and FR4 are as mentioned herein for FR2, FR3 and FR4 of Nanobodies of the KERE-class;
   and in which:
[0773] iv) CDR1, CDR2 and CDR3 are as defined herein, and are preferably as defined according to one of the preferred aspects herein, and are more preferably as defined according to one of the more preferred aspects herein.

[0774] The above Nanobodies may for example be V_{HH} sequences or may be humanized Nanobodies. When the above Nanobody sequences are V_{HH} sequences, they may be suitably humanized, as further described herein. When the Nanobodies are partially humanized Nanobodies, they may optionally be further suitably humanized, again as described herein.

[0775] A Nanobody of the GLEW class may be an amino acid sequence that is comprised of four framework regions/sequences interrupted by three complementarity determining regions/sequences, in which
[0776] i) preferably, when the Nanobody of the GLEW-class is a non-humanized Nanobody, the amino acid residue in position 108 is Q;
[0777] ii) FR1 is an amino acid sequence that has at least 80% amino acid identity with at least one of the following amino acid sequences:

TABLE A-15
Representative FW1 sequences for Nanobodies
of the GLEW-group.

| | | |
|---|---|---|
| GLEW FW1 | SEQ ID NO: 64 | QVQLVESGGGLVQPGGSLRL |
| sequence no. 1 | | SCAASGFTFS |
| GLEW FW1 | SEQ ID NO: 65 | EVHLVESGGGLVRPGGSLRL |
| sequence no. 2 | | SCAAFGFIFK |
| GLEW FW1 | SEQ ID NO: 66 | QVKLEESGGGLAQPGGSLRL |
| sequence no. 3 | | SCVASGFTFS |
| GLEW FW1 | SEQ ID NO: 67 | EVQLVESGGGLVQPGGSLRL |
| sequence no. 4 | | SCVCVSSGCT |
| GLEW FW1 | SEQ ID NO: 68 | EVQLVESGGGLALPGGSLTL |
| sequence no. 5 | | SCVFSGSTFS |

and in which:
[0778] iii) FR2 is an amino acid sequence that has at least 80% amino acid identity with at least one of the following amino acid sequences:

TABLE A-16
Representative FW2 sequences for Nanobodies
of the GLEW-group.

| | | |
|---|---|---|
| GLEW FW2 | SEQ ID NO: 72 | WVRQAPGKVLEWVS |
| sequence no. 1 | | |
| GLEW FW2 | SEQ ID NO: 73 | WVRRPPGKGLEWVS |
| sequence no. 2 | | |
| GLEW FW2 | SEQ ID NO: 74 | WVRQAPGMGLEWVS |
| sequence no. 3 | | |
| GLEW FW2 | SEQ ID NO: 75 | WVRQAPGKEPEWVS |
| sequence no. 4 | | |
| GLEW FW2 | SEQ ID NO: 76 | WVRQAPGKDQEWVS |
| sequence no. 5 | | |
| GLEW FW2 | SEQ ID NO: 77 | WVRQAPGKAEEWVS |
| sequence no. 6 | | |
| GLEW FW2 | SEQ ID NO: 78 | WVRQAPGKGLEWVA |
| sequence no. 7 | | |
| GLEW FW2 | SEQ ID NO: 79 | WVRQAPGRATEWVS |
| sequence no. 8 | | |

and in which:
[0779] iv) FR3 is an amino acid sequence that has at least 80% amino acid identity with at least one of the following amino acid sequences:

TABLE A-17
Representative FW3 sequences for Nanobodies
of the GLEW-group.

| | | |
|---|---|---|
| GLEW FW3 | SEQ ID NO: 80 | RFTISRDNAKNTLYLQMNSLK |
| sequence no. 1 | | PEDTAVYYCVK |
| GLEW FW3 | SEQ ID NO: 81 | RFTISRDNARNTLYLQMDSLIP |
| sequence no. 2 | | EDTALYYCAR |
| GLEW FW3 | SEQ ID NO: 82 | RFTSSRDNAKSTLYLQMNDLK |
| sequence no. 3 | | PEDTALYYCAR |
| GLEW FW3 | SEQ ID NO: 83 | RFIISRDNAKNTLYLQMNSLGP |
| sequence no. 4 | | EDTAMYYCQR |
| GLEW FW3 | SEQ ID NO: 84 | RFTASRDNAKNTLYLQMNSLKS |
| sequence no. 5 | | EDTARYYCAR |
| GLEW FW3 | SEQ ID NO: 85 | RFTISRDNAKNTLYLQMDDLQS |
| sequence no. 6 | | EDTAMYYCGR |

and in which:
[0780] v) FR4 is an amino acid sequence that has at least 80% amino acid identity with at least one of the following amino acid sequences:

TABLE A-18
Representative FW4 sequences for Nanobodies
of the GLEW-group.

| | | |
|---|---|---|
| GLEW FW4 sequence no. 1 | SEQ ID NO: 86 | GSQGTQVTVSS |
| GLEW FW4 sequence no. 2 | SEQ ID NO: 87 | LRGGTQVTVSS |
| GLEW FW4 sequence no. 3 | SEQ ID NO: 88 | RGQGTLVTVSS |
| GLEW FW4 sequence no. 4 | SEQ ID NO: 89 | RSRGIQVTVSS |
| GLEW FW4 sequence no. 5 | SEQ ID NO: 90 | WGKGTQVTVSS |
| GLEW FW4 sequence no. 6 | SEQ ID NO: 91 | WGQGTQVTVSS |

and in which:
[0781] vi) CDR1, CDR2 and CDR3 are as defined herein, and are preferably as defined according to one of the preferred aspects herein, and are more preferably as defined according to one of the more preferred aspects herein.

[0782] In the above Nanobodies, one or more of the further Hallmark residues are preferably as described herein (for example, when they are V_{HH} sequences or partially humanized Nanobodies).

[0783] With regard to framework 1, it will again be clear to the skilled person that, for determining the degree of amino acid identity, the amino acid residues on positions 1 to 4 and 27 to 30 are preferably disregarded.

[0784] In view of this, a Nanobody of the GLEW class may be an amino acid sequence that is comprised of four framework regions/sequences interrupted by three complementarity determining regions/sequences, in which:
[0785] i) preferably, when the Nanobody of the GLEW-class is a non-humanized Nanobody, the amino acid residue in position 108 is Q;
   and in which:
[0786] ii) FR1 is an amino acid sequence that, on positions 5 to 26 of the Kabat numbering, has at least 80% amino acid identity with at least one of the following amino acid sequences:

TABLE A-19
Representative FW1 sequences
(amino acid residues 5 to 26) for Nanobodies
of the KERE-group.

| | | |
|---|---|---|
| GLEW FW1 | SEQ ID NO: 69 | VESGGGLVQPGGSLRLSCAASG |
| sequence no. 6 | | |
| GLEW FW1 | SEQ ID NO: 70 | EESGGGLAQPGGSLRLSCVASG |
| sequence no. 7 | | |
| GLEW FW1 | SEQ ID NO: 71 | VESGGGLALPGGSLTLSCVFSG |
| sequence no. 8 | | |

and in which:
[0787] iii) FR2, FR3 and FR4 are as mentioned herein for FR2, FR3 and FR4 of Nanobodies of the GLEW-class;
   and in which:
[0788] iv) CDR1, CDR2 and CDR3 are as defined herein, and are preferably as defined according to one of the preferred aspects herein, and are more preferably as defined according to one of the more preferred aspects herein.

[0789] The above Nanobodies may for example be V_{HH} sequences or may be humanized Nanobodies. When the above Nanobody sequences are V_{HH} sequences, they may be suitably humanized, as further described herein. When the Nanobodies are partially humanized Nanobodies, they may optionally be further suitably humanized, again as described herein. In the above Nanobodies, one or more of the further Hallmark residues are preferably as described herein (for example, when they are V_{HH} sequences or partially humanized Nanobodies).

[0790] A Nanobody of the P, R, S 103 class may be an amino acid sequence that is comprised of four framework regions/sequences interrupted by three complementarity determining regions/sequences, in which
[0791] i) the amino acid residue at position 103 according to the Kabat numbering is different from W;
   and in which:
[0792] ii) preferably the amino acid residue at position 103 according to the Kabat numbering is P, R or S, and more preferably R;
   and in which:
[0793] iii) FR1 is an amino acid sequence that has at least 80% amino acid identity with at least one of the following amino acid sequences:

TABLE A-20
Representative FW1 sequences for Nanobodies
of the P, R, S 103-group.

| | | |
|---|---|---|
| P, R, S 103 FW1 | SEQ ID NO: 92 | AVQLVESGGGLVQAGGSLRL |
| sequence no. 1 | | SCAASGRTFS |
| P, R, S 103 FW1 | SEQ ID NO: 93 | QVQLQESGGGMVQPGGSLRL |
| sequence no. 2 | | SCAASGFDFG |
| P, R, S 103 FW1 | SEQ ID NO: 94 | EVHLVESGGGLVRPGGSLRL |
| sequence no. 3 | | SCAAFGFIFK |
| P, R, S 103 FW1 | SEQ ID NO: 95 | QVQLAESGGGLVQPGGSLKL |
| sequence no. 4 | | SCAASRTIVS |
| P, R, S 103 FW1 | SEQ ID NO: 96 | QEHLVESGGGLVDIGGSLRL |
| sequence no. 5 | | SCAASERIFS |
| P, R, S 103 FW1 | SEQ ID NO: 97 | QVKLEESGGGLAQPGGSLRL |
| sequence no. 6 | | SCVASGFTFS |
| P, R, S 103 FW1 | SEQ ID NO: 98 | EVQLVESGGGLVQPGGSLRL |
| sequence no. 7 | | SCVCVSSGCT |
| P, R, S 103 FW1 | SEQ ID NO: 99 | EVQLVESGGGLALPGGSLTL |
| sequence no. 8 | | SCVFSGSTFS |

and in which
[0794] iv) FR2 is an amino acid sequence that has at least 80% amino acid identity with at least one of the following amino acid sequences:

TABLE A-21
Representative FW2 sequences for Nanobodies
of the P, R, S 103-group.

| | | |
|---|---|---|
| P, R, S 103 FW2 | SEQ ID NO: 102 | WFRQAPGKEREFVA |
| sequence no. 1 | | |
| P, R, S 103 FW2 | SEQ ID NO: 103 | WVRQAPGKVLEWVS |
| sequence no. 2 | | |
| P, R, S 103 FW2 | SEQ ID NO: 104 | WVRRPPGKGLEWVS |
| sequence no. 3 | | |
| P, R, S 103 FW2 | SEQ ID NO: 105 | WIRQAPGKEREGVS |
| sequence no. 4 | | |
| P, R, S 103 FW2 | SEQ ID NO: 106 | WVRQYPGKEPEWVS |
| sequence no. 5 | | |
| P, R, S 103 FW2 | SEQ ID NO: 107 | WFRQPPGKEHEFVA |
| sequence no. 6 | | |
| P, R, S 103 FW2 | SEQ ID NO: 108 | WYRQAPGKRTELVA |
| sequence no. 7 | | |
| P, R, S 103 FW2 | SEQ ID NO: 109 | WLRQAPGQGLEWVS |
| sequence no. 8 | | |
| P, R, S 103 FW2 | SEQ ID NO: 110 | WLRQTPGKGLEWVG |
| sequence no. 9 | | |
| P, R, S 103 FW2 | SEQ ID NO: 111 | WVRQAPGKAEEFVS |
| sequence no. 10 | | |

and in which:
[0795] v) FR3 is an amino acid sequence that has at least 80% amino acid identity with at least one of the following amino acid sequences:

TABLE A-22
Representative FW3 sequences for Nanobodies
of the P, R, S 103-group.

| | | |
|---|---|---|
| P, R, S 103 FW3 | SEQ ID NO: 112 | RFTISRDNAKNTVYLQMNS |
| sequence no. 1 | | LKPEDTAVYYCAA |
| P, R, S 103 FW3 | SEQ ID NO: 113 | RFTISRDNARNTLYLQMDS |
| sequence no. 2 | | LIPEDTALYYCAR |
| P, R, S 103 FW3 | SEQ ID NO: 114 | RFTISRDNAKNEMYLQMNN |
| sequence no. 3 | | LKTEDTGVYVVCGA |
| P, R, S 103 FW3 | SEQ ID NO: 115 | RFTISSDSNRNMIYLQMNN |
| sequence no. 4 | | LKPEDTAVYYCAA |
| P, R, S 103 FW3 | SEQ ID NO: 116 | RFTISRDNAKNMLYLHLNN |
| sequence no. 5 | | LKSEDTAVYYCRR |
| P, R, S 103 FW3 | SEQ ID NO: 117 | RFTISRDNAKKTVYLRLNS |
| sequence no. 6 | | LNPEDTAVYSCNL |
| P, R, S 103 FW3 | SEQ ID NO: 118 | RFKISRDNAKKTLYLQMNS |
| sequence no. 7 | | LGPEDTAMYYCQR |
| P, R, S 103 FW3 | SEQ ID NO: 119 | RFTVSRDNGKNTAYLRMNS |
| sequence no. 8 | | LKPEDTADYYCAV |

and in which:
[0796] vi) FR4 is an amino acid sequence that has at least 80% amino acid identity with at least one of the following amino acid sequences:

TABLE A-23
Representative FW4 sequences for Nanobodies
of the P, R, S 103-group.

| | | |
|---|---|---|
| P, R, S 103 FW4 | SEQ ID NO: 120 | RGQGTQVTVSS |
| sequence no. 1 | | |
| P, R, S 103 FW4 | SEQ ID NO: 121 | LRGGTQVTVSS |
| sequence no. 2 | | |
| P, R, S 103 FW4 | SEQ ID NO: 122 | GNKGTLVTVSS |
| sequence no. 3 | | |
| P, R, S 103 FW4 | SEQ ID NO: 123 | SSPGTQVTVSS |
| sequence no. 4 | | |
| P, R, S 103 FW4 | SEQ ID NO: 124 | SSQGTLVTVSS |
| sequence no. 5 | | |
| P, R, S 103 FW4 | SEQ ID NO: 125 | RSRGIQVTVSS |
| sequence no. 6 | | |

and in which:
[0797] vii) CDR1, CDR2 and CDR3 are as defined herein, and are preferably as defined according to one of the preferred aspects herein, and are more preferably as defined according to one of the more preferred aspects herein.

[0798] In the above Nanobodies, one or more of the further Hallmark residues are preferably as described herein (for example, when they are V_{HH} sequences or partially humanized Nanobodies).

[0799] With regard to framework 1, it will again be clear to the skilled person that, for determining the degree of amino acid identity, the amino acid residues on positions 1 to 4 and 27 to 30 are preferably disregarded.

[0800] In view of this, a Nanobody of the P, R, S 103 class may be an amino acid sequence that is comprised of four framework regions/sequences interrupted by three complementarity determining regions/sequences, in which:
[0801] i) the amino acid residue at position 103 according to the Kabat numbering is different from W;
   and in which:
[0802] ii) preferably the amino acid residue at position 103 according to the Kabat numbering is P, R or S, and more preferably R;
   and in which:
[0803] iii) FR1 is an amino acid sequence that, on positions 5 to 26 of the Kabat numbering, has at least 80% amino acid identity with at least one of the following amino acid sequences:

TABLE A-24
Representative FW1 sequences
(amino acid residues 5 to 26) for Nanobodies
of the P, R, S 103-group.

| | | |
|---|---|---|
| P, R, S 103 FW1 | SEQ ID NO: 100 | VESGGGLVQAGGSLRLSC |
| sequence no. 9 | | AASG |
| P, R, S 103 FW1 | SEQ ID NO: 101 | AESGGGLVQPGGSLKLSC |
| sequence no. 10 | | AASR |

and in which:
[0804] iv) FR2, FR3 and FR4 are as mentioned herein for FR2, FR3 and FR4 of Nanobodies of the P, R, S 103 class;
   and in which:
[0805] v) CDR1, CDR2 and CDR3 are as defined herein, and are preferably as defined according to one of the preferred aspects herein, and are more preferably as defined according to one of the more preferred aspects herein.

[0806] The above Nanobodies may for example be V_{HH} sequences or may be humanized Nanobodies. When the above Nanobody sequences are V_{HH} sequences, they may be suitably humanized, as further described herein. When the Nanobodies are partially humanized Nanobodies, they may optionally be further suitably humanized, again as described herein.

[0807] In the above Nanobodies, one or more of the further Hallmark residues are preferably as described herein (for example, when they are V_{HH} sequences or partially humanized Nanobodies).

[0808] In another preferred, but non-limiting aspect, the invention relates to a Nanobody as described above, in which the CDR sequences have at least 70% amino acid identity, preferably at least 80% amino acid identity, more preferably at least 90% amino acid identity, such as 95% amino acid identity or more or even essentially 100% amino acid identity with the CDR sequences of at least one of the amino acid sequences of SEQ ID NO's: 2051-2325. This degree of amino acid identity can for example be determined by determining the degree of amino acid identity (in a manner described herein) between said Nanobody and one or more of the sequences of SEQ ID NO's: 2051-2325, in which the amino acid residues that form the framework regions are disregarded. Such Nanobodies can be as further described herein.

[0809] As already mentioned herein, another preferred but non-limiting aspect of the invention relates to a Nanobody with an amino acid sequence that is chosen from the group consisting of SEQ ID NO's: 2051-2325 or from the group consisting of from amino acid sequences that have more than 80%, preferably more than 90%, more preferably more than 95%, such as 99% or more sequence identity (as defined herein) with at least one of the amino acid sequences of SEQ ID NO's: 2051-2325.

[0810] Also, in the above Nanobodies:
[0811] i) any amino acid substitution (when it is not a humanizing substitution as defined herein) is preferably, and compared to the corresponding amino acid sequence of SEQ ID NO's: 2051-2325, a conservative amino acid substitution, (as defined herein);
   and/or:
[0812] ii) its amino acid sequence preferably contains either only amino acid substitutions, or otherwise preferably no more than 5, preferably no more than 3, and more preferably only 1 or 2 amino acid deletions or insertions, compared to the corresponding amino acid sequence of SEQ ID NO's: 2051-2325;
   and/or
[0813] iii) the CDR's may be CDR's that are derived by means of maturation, for example starting from the CDR's of to the corresponding amino acid sequence of SEQ ID NO's: 2051-2325.

[0814] Preferably, the CDR sequences and FR sequences in the Nanobodies of the invention are such that the Nanobodies of the invention (and polypeptides of the invention comprising the same):
[0815] bind to HER2 with a dissociation constant (K_{D}) of 10⁻⁵ to 10⁻¹² moles/liter or less, and preferably 10⁻⁷ to 10⁻¹² moles/liter or less and more preferably 10⁻⁸ to 10⁻¹² moles/liter (i.e. with an association constant (K_{A}) of 10⁵ to 10¹² liter/moles or more, and preferably 10⁷ to 10¹² liter/moles or more and more preferably 10⁸ to 10¹² liter/moles);
   and/or such that they:
[0816] bind to HER2 with a kₒₙ-rate of between 10² M⁻¹ s⁻¹ to about 10⁷ M⁻¹ s⁻¹, preferably between 10³ M⁻¹ s⁻¹ and 10⁷ M⁻¹ s⁻¹, more preferably between 10⁴ M⁻¹ s⁻¹ and 10⁷ M⁻¹ s⁻¹, such as between 10⁵ M⁻¹ s⁻¹ and 10⁷ M⁻¹ s⁻¹;
   and/or such that they:
[0817] bind to HER2 with a k_{off} rate between 1 s⁻¹ (t_{1/2}=0.69 s) and 10⁻⁶ s⁻¹ (providing a near irreversible complex with a t_{1/2} of multiple days), preferably between 10⁻² s⁻¹ and 10⁻⁶ s⁻¹, more preferably between 10⁻³ s⁻¹ and 10⁻⁶ s⁻¹, such as between 10⁻⁴ s⁻¹ and 10⁻⁶ s⁻¹.

[0818] Preferably, CDR sequences and FR sequences present in the Nanobodies of the invention are such that the Nanobodies of the invention will bind to HER2 with an affinity less than 500 nM, preferably less than 200 nM, more preferably less than 10 nM, such as less than 500 μM.

[0819] According to one non-limiting aspect of the invention, a Nanobody may be as defined herein, but with the proviso that it has at least “one amino acid difference” (as defined herein) in at least one of the framework regions compared to the corresponding framework region of a naturally occurring human V_{H} domain, and in particular compared to the corresponding framework region of DP-47. More specifically, according to one non-limiting aspect of the invention, a Nanobody may be as defined herein, but with the proviso that it has at least “one amino acid difference” (as defined herein) at least one of the Hallmark residues (including those at positions 108, 103 and/or 45) compared to the corresponding framework region of a naturally occurring human V_{H} domain, and in particular compared to the corresponding framework region of DP-47. Usually, a Nanobody will have at least one such amino acid difference with a naturally occurring V_{H} domain in at least one of FR2 and/or FR4, and in particular at least one of the Hallmark residues in FR2 and/or FR4 (again, including those at positions 108, 103 and/or 45).

[0820] Also, a humanized Nanobody of the invention may be as defined herein, but with the proviso that it has at least “one amino acid difference” (as defined herein) in at least one of the framework regions compared to the corresponding framework region of a naturally occurring V_{HH} domain. More specifically, according to one non-limiting aspect of the invention, a humanized Nanobody may be as defined herein, but with the proviso that it has at least “one amino acid difference” (as defined herein) at least one of the Hallmark residues (including those at positions 108, 103 and/or 45) compared to the corresponding framework region of a naturally occurring V_{HH} domain. Usually, a humanized Nanobody will have at least one such amino acid difference with a naturally occurring V_{HH} domain in at least one of FR2 and/or FR4, and in particular at least one of the Hallmark residues in FR2 and/or FR4 (again, including those at positions 108, 103 and/or 45).

[0821] As will be clear from the disclosure herein, it is also within the scope of the invention to use natural or synthetic analogs, mutants, variants, alleles, homologs and orthologs (herein collectively referred to as “analogs”) of the Nanobodies of the invention as defined herein, and in particular analogs of the Nanobodies of SEQ ID NO's 2051-2325. Thus, according to one aspect of the invention, the term “Nanobody of the invention” in its broadest sense also covers such analogs.

[0822] Generally, in such analogs, one or more amino acid residues may have been replaced, deleted and/or added, compared to the Nanobodies of the invention as defined herein. Such substitutions, insertions or deletions may be made in one or more of the framework regions and/or in one or more of the CDR's. When such substitutions, insertions or deletions are made in one or more of the framework regions, they may be made at one or more of the Hallmark residues and/or at one or more of the other positions in the framework residues, although substitutions, insertions or deletions at the Hallmark residues are generally less preferred (unless these are suitable humanizing substitutions as described herein).

[0823] By means of non-limiting examples, a substitution may for example be a conservative substitution (as described herein) and/or an amino acid residue may be replaced by another amino acid residue that naturally occurs at the same position in another V_{HH} domain (see Tables A-5 to A-8 for some non-limiting examples of such substitutions), although the invention is generally not limited thereto. Thus, any one or more substitutions, deletions or insertions, or any combination thereof, that either improve the properties of the Nanobody of the invention or that at least do not detract too much from the desired properties or from the balance or combination of desired properties of the Nanobody of the invention (i.e. to the extent that the Nanobody is no longer suited for its intended use) are included within the scope of the invention. A skilled person will generally be able to determine and select suitable substitutions, deletions or insertions, or suitable combinations of thereof, based on the disclosure herein and optionally after a limited degree of routine experimentation, which may for example involve introducing a limited number of possible substitutions and determining their influence on the properties of the Nanobodies thus obtained.

[0824] For example, and depending on the host organism used to express the Nanobody or polypeptide of the invention, such deletions and/or substitutions may be designed in such a way that one or more sites for post-translational modification (such as one or more glycosylation sites) are removed, as will be within the ability of the person skilled in the art. Alternatively, substitutions or insertions may be designed so as to introduce one or more sites for attachment of functional groups (as described herein), for example to allow site-specific pegylation (again as described herein).

[0825] As can be seen from the data on the V_{HH} entropy and V_{HH} variability given in Tables A-5 to A-8 above, some amino acid residues in the framework regions are more conserved than others. Generally, although the invention in its broadest sense is not limited thereto, any substitutions, deletions or insertions are preferably made at positions that are less conserved. Also, generally, amino acid substitutions are preferred over amino acid deletions or insertions.

[0826] The analogs are preferably such that they can bind to HER2 with an affinity (suitably measured and/or expressed as a K_{D}-value (actual or apparent), a K_{A}-value (actual or apparent), a kₒₙ-rate and/or a k_{off} rate, or alternatively as an IC₅₀ value, as further described herein) that is as defined herein for the Nanobodies of the invention.

[0827] The analogs are preferably also such that they retain the favourable properties the Nanobodies, as described herein.

[0828] Also, according to one preferred aspect, the analogs have a degree of sequence identity of at least 70%, preferably at least 80%, more preferably at least 90%, such as at least 95% or 99% or more; and/or preferably have at most 20, preferably at most 10, even more preferably at most 5, such as 4, 3, 2 or only 1 amino acid difference (as defined herein), with one of the Nanobodies of SEQ ID NOs: 2051-2325.

[0829] Also, the framework sequences and CDR's of the analogs are preferably such that they are in accordance with the preferred aspects defined herein. More generally, as described herein, the analogs will have (a) a Q at position 108; and/or (b) a charged amino acid or a cysteine residue at position 45 and preferably an E at position 44, and more preferably E at position 44 and Rat position 45; and/or (c) P, R or S at position 103.

[0830] One preferred class of analogs of the Nanobodies of the invention comprise Nanobodies that have been humanized (i.e. compared to the sequence of a naturally occurring Nanobody of the invention). As mentioned in the background art cited herein, such humanization generally involves replacing one or more amino acid residues in the sequence of a naturally occurring V_{HH} with the amino acid residues that occur at the same position in a human V_{H} domain, such as a human V_{H}3 domain. Examples of possible humanizing substitutions or combinations of humanizing substitutions will be clear to the skilled person, for example from the Tables herein, from the possible humanizing substitutions mentioned in the background art cited herein, and/or from a comparison between the sequence of a Nanobody and the sequence of a naturally occurring human V_{H} domain.

[0831] The humanizing substitutions should be chosen such that the resulting humanized Nanobodies still retain the favourable properties of Nanobodies as defined herein, and more preferably such that they are as described for analogs in the preceding paragraphs. A skilled person will generally be able to determine and select suitable humanizing substitutions or suitable combinations of humanizing substitutions, based on the disclosure herein and optionally after a limited degree of routine experimentation, which may for example involve introducing a limited number of possible humanizing substitutions and determining their influence on the properties of the Nanobodies thus obtained.

[0832] Generally, as a result of humanization, the Nanobodies of the invention may become more “human-like”, while still retaining the favorable properties of the Nanobodies of the invention as described herein. As a result, such humanized Nanobodies may have several advantages, such as a reduced immunogenicity, compared to the corresponding naturally occurring V_{HH} domains. Again, based on the disclosure herein and optionally after a limited degree of routine experimentation, the skilled person will be able to select humanizing substitutions or suitable combinations of humanizing substitutions which optimize or achieve a desired or suitable balance between the favourable properties provided by the humanizing substitutions on the one hand and the favourable properties of naturally occurring V_{HH} domains on the other hand.

[0833] The Nanobodies of the invention may be suitably humanized at any framework residue(s), such as at one or more Hallmark residues (as defined herein) or at one or more other framework residues (i.e. non-Hallmark residues) or any suitable combination thereof. One preferred humanizing substitution for Nanobodies of the “P,R,S-103 group” or the “KERB group” is Q108 into L108. Nanobodies of the “GLEW class” may also be humanized by a Q108 into L108 substitution, provided at least one of the other Hallmark residues contains a camelid (camelizing) substitution (as defined herein). For example, as mentioned above, one particularly preferred class of humanized Nanobodies has GLEW or a GLEW-like sequence at positions 44-47; P, R or S (and in particular R) at position 103, and an L at position 108.

[0834] The humanized and other analogs, and nucleic acid sequences encoding the same, can be provided in any manner known per se. For example, the analogs can be obtained by providing a nucleic acid that encodes a naturally occurring V_{HH} domain, changing the codons for the one or more amino acid residues that are to be substituted into the codons for the corresponding desired amino acid residues (e.g. by site-directed mutagenesis or by PCR using suitable mismatch primers), expressing the nucleic acid/nucleotide sequence thus obtained in a suitable host or expression system; and optionally isolating and/or purifying the analog thus obtained to provide said analog in essentially isolated form (e.g. as further described herein). This can generally be performed using methods and techniques known per se, which will be clear to the skilled person, for example from the handbooks and references cited herein, the background art cited herein and/or from the further description herein. Alternatively, a nucleic acid encoding the desired analog can be synthesized in a manner known per se (for example using an automated apparatus for synthesizing nucleic acid sequences with a predefined amino acid sequence) and can then be expressed as described herein. Yet another technique may involve combining one or more naturally occurring and/or synthetic nucleic acid sequences each encoding a part of the desired analog, and then expressing the combined nucleic acid sequence as described herein. Also, the analogs can be provided using chemical synthesis of the pertinent amino acid sequence using techniques for peptide synthesis known per se, such as those mentioned herein.

[0835] In this respect, it will be also be clear to the skilled person that the Nanobodies of the invention (including their analogs) can be designed and/or prepared starting from human V_{H} sequences (i.e. amino acid sequences or the corresponding nucleotide sequences), such as for example from human V_{H}3 sequences such as DP-47, DP-51 or DP-29, i.e. by introducing one or more camelizing substitutions (i.e. changing one or more amino acid residues in the amino acid sequence of said human V_{H} domain into the amino acid residues that occur at the corresponding position in a V_{HH} domain), so as to provide the sequence of a Nanobody of the invention and/or so as to confer the favourable properties of a Nanobody to the sequence thus obtained. Again, this can generally be performed using the various methods and techniques referred to in the previous paragraph, using an amino acid sequence and/or nucleotide sequence for a human V_{H} domain as a starting point.

[0836] Some preferred, but non-limiting camelizing substitutions can be derived from Tables A-5-A-8. It will also be clear that camelizing substitutions at one or more of the Hallmark residues will generally have a greater influence on the desired properties than substitutions at one or more of the other amino acid positions, although both and any suitable combination thereof are included within the scope of the invention. For example, it is possible to introduce one or more camelizing substitutions that already confer at least some the desired properties, and then to introduce further camelizing substitutions that either further improve said properties and/or confer additional favourable properties. Again, the skilled person will generally be able to determine and select suitable camelizing substitutions or suitable combinations of camelizing substitutions, based on the disclosure herein and optionally after a limited degree of routine experimentation, which may for example involve introducing a limited number of possible camelizing substitutions and determining whether the favourable properties of Nanobodies are obtained or improved (i.e. compared to the original V_{H} domain). Generally, however, such camelizing substitutions are preferably such that the resulting an amino acid sequence at least contains (a) a Q at position 108; and/or (b) a charged amino acid or a cysteine residue at position 45 and preferably also an E at position 44, and more preferably E at position 44 and R at position 45; and/or (c) P, R or S at position 103; and optionally one or more further camelizing substitutions. More preferably, the camelizing substitutions are such that they result in a Nanobody of the invention and/or in an analog thereof (as defined herein), such as in a humanized analog and/or preferably in an analog that is as defined in the preceding paragraphs.

[0837] As will also be clear from the disclosure herein, it is also within the scope of the invention to use parts or fragments, or combinations of two or more parts or fragments, of the Nanobodies of the invention as defined herein, and in particular parts or fragments of the Nanobodies of SEQ ID NO's: 2051-2325. Thus, according to one aspect of the invention, the term “Nanobody of the invention” in its broadest sense also covers such parts or fragments.

[0838] Generally, such parts or fragments of the Nanobodies of the invention (including analogs thereof) have amino acid sequences in which, compared to the amino acid sequence of the corresponding full length Nanobody of the invention (or analog thereof), one or more of the amino acid residues at the N-terminal end, one or more amino acid residues at the C-terminal end, one or more contiguous internal amino acid residues, or any combination thereof, have been deleted and/or removed.

[0839] The parts or fragments are preferably such that they can bind to HER2 with an affinity (suitably measured and/or expressed as a K_{D}-value (actual or apparent), a K_{A}-value (actual or apparent), a kₒₙ-rate and/or a k_{off}-rate, or alternatively as an IC₅₀ value, as further described herein) that is as defined herein for the Nanobodies of the invention.

[0840] Any part or fragment is preferably such that it comprises at least 10 contiguous amino acid residues, preferably at least 20 contiguous amino acid residues, more preferably at least 30 contiguous amino acid residues, such as at least 40 contiguous amino acid residues, of the amino acid sequence of the corresponding full length Nanobody of the invention.

[0841] Also, any part or fragment is such preferably that it comprises at least one of CDR1, CDR2 and/or CDR3 or at least part thereof (and in particular at least CDR3 or at least part thereof). More preferably, any part or fragment is such that it comprises at least one of the CDR's (and preferably at least CDR3 or part thereof) and at least one other CDR (i.e. CDR1 or CDR2) or at least part thereof, preferably connected by suitable framework sequence(s) or at least part thereof. More preferably, any part or fragment is such that it comprises at least one of the CDR's (and preferably at least CDR3 or part thereof) and at least part of the two remaining CDR's, again preferably connected by suitable framework sequence(s) or at least part thereof.

[0842] According to another particularly preferred, but non-limiting aspect, such a part or fragment comprises at least CDR3, such as FR3, CDR3 and FR4 of the corresponding full length Nanobody of the invention, i.e. as for example described in the International application WO 03/050531 (Lasters et al.).

[0843] As already mentioned above, it is also possible to combine two or more of such parts or fragments (i.e. from the same or different Nanobodies of the invention), i.e. to provide an analog (as defined herein) and/or to provide further parts or fragments (as defined herein) of a Nanobody of the invention. It is for example also possible to combine one or more parts or fragments of a Nanobody of the invention with one or more parts or fragments of a human V_{H} domain.

[0844] According to one preferred aspect, the parts or fragments have a degree of sequence identity of at least 50%, preferably at least 60%, more preferably at least 70%, even more preferably at least 80%, such as at least 90%, 95% or 99% or more with one of the Nanobodies of SEQ ID NOs: 2051-2325.

[0845] The parts and fragments, and nucleic acid sequences encoding the same, can be provided and optionally combined in any manner known per se. For example, such parts or fragments can be obtained by inserting a stop codon in a nucleic acid that encodes a full-sized Nanobody of the invention, and then expressing the nucleic acid thus obtained in a manner known per se (e.g. as described herein). Alternatively, nucleic acids encoding such parts or fragments can be obtained by suitably restricting a nucleic acid that encodes a full-sized Nanobody of the invention or by synthesizing such a nucleic acid in a manner known per se. Parts or fragments may also be provided using techniques for peptide synthesis known per se.

[0846] The invention in its broadest sense also comprises derivatives of the Nanobodies of the invention. Such derivatives can generally be obtained by modification, and in particular by chemical and/or biological (e.g. enzymatical) modification, of the Nanobodies of the invention and/or of one or more of the amino acid residues that form the Nanobodies of the invention.

[0847] Examples of such modifications, as well as examples of amino acid residues within the Nanobody sequence that can be modified in such a manner (i.e. either on the protein backbone but preferably on a side chain), methods and techniques that can be used to introduce such modifications and the potential uses and advantages of such modifications will be clear to the skilled person.

[0848] For example, such a modification may involve the introduction (e.g. by covalent linking or in an other suitable manner) of one or more functional groups, residues or moieties into or onto the Nanobody of the invention, and in particular of one or more functional groups, residues or moieties that confer one or more desired properties or functionalities to the Nanobody of the invention. Example of such functional groups will be clear to the skilled person.

[0849] For example, such modification may comprise the introduction (e.g. by covalent binding or in any other suitable manner) of one or more functional groups that increase the half-life, the solubility and/or the absorption of the Nanobody of the invention, that reduce the immunogenicity and/or the toxicity of the Nanobody of the invention, that eliminate or attenuate any undesirable side effects of the Nanobody of the invention, and/or that confer other advantageous properties to and/or reduce the undesired properties of the Nanobodies and/or polypeptides of the invention; or any combination of two or more of the foregoing. Examples of such functional groups and of techniques for introducing them will be clear to the skilled person, and can generally comprise all functional groups and techniques mentioned in the general background art cited hereinabove as well as the functional groups and techniques known per se for the modification of pharmaceutical proteins, and in particular for the modification of antibodies or antibody fragments (including ScFv's and single domain antibodies), for which reference is for example made to Remington's Pharmaceutical Sciences, 16th ed., Mack Publishing Co., Easton, Pa. (1980). Such functional groups may for example be linked directly (for example covalently) to a Nanobody of the invention, or optionally via a suitable linker or spacer, as will again be clear to the skilled person.

[0850] One of the most widely used techniques for increasing the half-life and/or reducing the immunogenicity of pharmaceutical proteins comprises attachment of a suitable pharmacologically acceptable polymer, such as poly(ethyleneglycol) (PEG) or derivatives thereof (such as methoxypoly(ethyleneglycol) or mPEG). Generally, any suitable form of pegylation can be used, such as the pegylation used in the art for antibodies and antibody fragments (including but not limited to (single) domain antibodies and ScFv's); reference is made to for example Chapman, Nat. Biotechnol., 54, 531-545 (2002); by Veronese and Harris, Adv. Drug Deliv. Rev. 54, 453-456 (2003), by Harris and Chess, Nat. Rev. Drug. Discov. 2, (2003) and in WO 04/060965. Various reagents for pegylation of proteins are also commercially available, for example from Nektar Therapeutics, USA.

[0851] Preferably, site-directed pegylation is used, in particular via a cysteine-residue (see for example Yang et al., Protein Engineering, 16, 10, 761-770 (2003). For example, for this purpose, PEG may be attached to a cysteine residue that naturally occurs in a Nanobody of the invention, a Nanobody of the invention may be modified so as to suitably introduce one or more cysteine residues for attachment of PEG, or an amino acid sequence comprising one or more cysteine residues for attachment of PEG may be fused to the N- and/or C-terminus of a Nanobody of the invention, all using techniques of protein engineering known per se to the skilled person.

[0852] Preferably, for the Nanobodies and proteins of the invention, a PEG is used with a molecular weight of more than 5000, such as more than 10,000 and less than 200,000, such as less than 100,000; for example in the range of 20,000-80,000.

[0853] Another, usually less preferred modification comprises N-linked or O-linked glycosylation, usually as part of co-translational and/or post-translational modification, depending on the host cell used for expressing the Nanobody or polypeptide of the invention.

[0854] Yet another modification may comprise the introduction of one or more detectable labels or other signal-generating groups or moieties, depending on the intended use of the labelled Nanobody. Suitable labels and techniques for attaching, using and detecting them will be clear to the skilled person, and for example include, but are not limited to, fluorescent labels (such as fluorescein, isothiocyanate, rhodamine, phycoerythrin, phycocyanin, allophycocyanin, o-phthaldehyde, and fluorescamine and fluorescent metals such as ¹⁵²Eu or others metals from the lanthanide series), phosphorescent labels, chemiluminescent labels or bioluminescent labels (such as luminal, isoluminol, theromatic acridinium ester, imidazole, acridinium salts, oxalate ester, dioxetane or GFP and its analogs), radio-isotopes (such as ³H, ¹²⁵I, ³²P, ³⁵S, ¹⁴C, ⁵¹Cr, ³⁶Cl, ⁵⁷Co, ⁵⁸Co, ⁵⁹Fe, and ⁷⁵Se), metals, metal chelates or metallic cations (for example metallic cations such as ^{99m}Tc, ¹²³I, ¹¹¹In, ¹³¹I, ⁹⁷Ru, ⁶⁷Cu, ⁶⁷Ga, and ⁶⁸Ga or other metals or metallic cations that are particularly suited for use in in vivo, in vitro or in situ diagnosis and imaging, such as (¹⁵⁷Gd, ⁵⁵Mn, ¹⁶²Dy, ⁵²Cr, and ⁵⁶Fe), as well as chromophores and enzymes (such as malate dehydrogenase, staphylococcal nuclease, delta-V-steroid isomerase, yeast alcohol dehydrogenase, alpha-glycerophosphate dehydrogenase, triose phosphate isomerase, biotinavidin peroxidase, horseradish peroxidase, alkaline phosphatase, asparaginase, glucose oxidase, beta-galactosidase, ribonuclease, urease, catalase, glucose-VI-phosphate dehydrogenase, glucoamylase and acetylcholine esterase). Other suitable labels will be clear to the skilled person, and for example include moieties that can be detected using NMR or ESR spectroscopy.

[0855] Such labelled Nanobodies and polypeptides of the invention may for example be used for in vitro, in vivo or in situ assays (including immunoassays known per se such as ELISA, RIA, ETA and other “sandwich assays”, etc.) as well as in vivo diagnostic and imaging purposes, depending on the choice of the specific label.

[0856] As will be clear to the skilled person, another modification may involve the introduction of a chelating group, for example to chelate one of the metals or metallic cations referred to above. Suitable chelating groups for example include, without limitation, diethylenetriaminepentaacetic acid (DTPA) or ethylenediaminetetraacetic acid (EDTA).

[0857] Yet another modification may comprise the introduction of a functional group that is one part of a specific binding pair, such as the biotin-(strept)avidin binding pair, Such a functional group may be used to link the Nanobody of the invention to another protein, polypeptide or chemical compound that is bound to the other half of the binding pair, i.e. through formation of the binding pair. For example, a Nanobody of the invention may be conjugated to biotin, and linked to another protein, polypeptide, compound or carrier conjugated to avidin or streptavidin. For example, such a conjugated Nanobody may be used as a reporter, for example in a diagnostic system where a detectable signal-producing agent is conjugated to avidin or streptavidin. Such binding pairs may for example also be used to bind the Nanobody of the invention to a carrier, including carriers suitable for pharmaceutical purposes. One non-limiting example are the liposomal formulations described by Cao and Suresh, Journal of Drug Targeting, 8, 4, 257 (2000). Such binding pairs may also be used to link a therapeutically active agent to the Nanobody of the invention.

[0858] For some applications, in particular for those applications in which it is intended to kill a cell that expresses the target against which the Nanobodies of the invention are directed (e.g. in the treatment of cancer), or to reduce or slow the growth and/or proliferation such a cell, the Nanobodies of the invention may also be linked to a toxin or to a toxic residue or moiety. Examples of toxic moieties, compounds or residues which can be linked to a Nanobody of the invention to provide—for example—a cytotoxic compound will be clear to the skilled person and can for example be found in the prior art cited above and/or in the further description herein. One example is the so-called ADEPT™ technology described in WO 03/055527.

[0859] Other potential chemical and enzymatical modifications will be clear to the skilled person. Such modifications may also be introduced for research purposes (e.g. to study function-activity relationships). Reference is for example made to Lundblad and Bradshaw, Biotechnol. Appl. Biochem., 26, 143-151 (1997).

[0860] Preferably, the derivatives are such that they bind to HER2 with an affinity (suitably measured and/or expressed as a K_{D}-value (actual or apparent), a K_{A}-value (actual or apparent), a kₒₙ-rate and/or a k_{off}-rate, or alternatively as an IC₅₀ value, as further described herein) that is as defined herein for the Nanobodies of the invention.

[0861] As mentioned above, the invention also relates to proteins or polypeptides that essentially consist of or comprise at least one Nanobody of the invention. By “essentially consist of” is meant that the amino acid sequence of the polypeptide of the invention either is exactly the same as the amino acid sequence of a Nanobody of the invention or corresponds to the amino acid sequence of a Nanobody of the invention which has a limited number of amino acid residues, such as 1-20 amino acid residues, for example 1-10 amino acid residues and preferably 1-6 amino acid residues, such as 1, 2, 3, 4, 5 or 6 amino acid residues, added at the amino terminal end, at the carboxy terminal end, or at both the amino terminal end and the carboxy terminal end of the amino acid sequence of the Nanobody.

[0862] Said amino acid residues may or may not change, alter or otherwise influence the (biological) properties of the Nanobody and may or may not add further functionality to the Nanobody. For example, such amino acid residues:
[0863] can comprise an N-terminal Met residue, for example as result of expression in a heterologous host cell or host organism.
[0864] may form a signal sequence or leader sequence that directs secretion of the Nanobody from a host cell upon synthesis. Suitable secretory leader peptides will be clear to the skilled person, and may be as further described herein. Usually, such a leader sequence will be linked to the N-terminus of the Nanobody, although the invention in its broadest sense is not limited thereto;
[0865] may form a sequence or signal that allows the Nanobody to be directed towards and/or to penetrate or enter into specific organs, tissues, cells, or parts or compartments of cells, and/or that allows the Nanobody to penetrate or cross a biological barrier such as a cell membrane, a cell layer such as a layer of epithelial cells, a tumor including solid tumors, or the blood-brain-barrier. Examples of such amino acid sequences will be clear to the skilled person. Some non-limiting examples are the small peptide vectors (“Pep-trans vectors”) described in WO 03/026700 and in Temsamani et al., Expert Opin. Biol. Ther., 1, 773 (2001); Temsamani and Vidal, Drug Discov. Today, 9, 1012 (004) and Rousselle, J. Pharmacol. Exp. Ther., 296, 124-131 (2001), and the membrane translocator sequence described by Zhao et al., Apoptosis, 8, 631-637 (2003). C-terminal and N-terminal amino acid sequences for intracellular targeting of antibody fragments are for example described by Cardinale et al., Methods, 34, 171 (2004). Other suitable techniques for intracellular targeting involve the expression and/or use of so-called “intrabodies” comprising a Nanobody of the invention, as mentioned below;
[0866] may form a “tag”, for example an amino acid sequence or residue that allows or facilitates the purification of the Nanobody, for example using affinity techniques directed against said sequence or residue. Thereafter, said sequence or residue may be removed (e.g. by chemical or enzymatical cleavage) to provide the Nanobody sequence (for this purpose, the tag may optionally be linked to the Nanobody sequence via a cleavable linker sequence or contain a cleavable motif). Some preferred, but non-limiting examples of such residues are multiple histidine residues, glutatione residues and a myc-tag (see for example SEQ ID NO:31 of WO 06/12282).
[0867] may be one or more amino acid residues that have been functionalized and/or that can serve as a site for attachment of functional groups. Suitable amino acid residues and functional groups will be clear to the skilled person and include, but are not limited to, the amino acid residues and functional groups mentioned herein for the derivatives of the Nanobodies of the invention.

[0868] According to another aspect, a polypeptide of the invention comprises a Nanobody of the invention, which is fused at its amino terminal end, at its carboxy terminal end, or both at its amino terminal end and at its carboxy terminal end to at least one further amino acid sequence, i.e. so as to provide a fusion protein comprising said Nanobody of the invention and the one or more further amino acid sequences. Such a fusion will also be referred to herein as a “Nanobody fusion”.

[0869] The one or more further amino acid sequence may be any suitable and/or desired amino acid sequences. The further amino acid sequences may or may not change, alter or otherwise influence the (biological) properties of the Nanobody, and may or may not add further functionality to the Nanobody or the polypeptide of the invention. Preferably, the further amino acid sequence is such that it confers one or more desired properties or functionalities to the Nanobody or the polypeptide of the invention.

[0870] For example, the further amino acid sequence may also provide a second binding site, which binding site may be directed against any desired protein, polypeptide, antigen, antigenic determinant or epitope (including but not limited to the same protein, polypeptide, antigen, antigenic determinant or epitope against which the Nanobody of the invention is directed, or a different protein, polypeptide, antigen, antigenic determinant or epitope).

[0871] Example of such amino acid sequences will be clear to the skilled person, and may generally comprise all amino acid sequences that are used in peptide fusions based on conventional antibodies and fragments thereof (including but not limited to ScFv's and single domain antibodies). Reference is for example made to the review by Holliger and Hudson, Nature Biotechnology, 23, 9, 1126-1136 (2005).

[0872] For example, such an amino acid sequence may be an amino acid sequence that increases the half-life, the solubility, or the absorption, reduces the immunogenicity or the toxicity, eliminates or attenuates undesirable side effects, and/or confers other advantageous properties to and/or reduces the undesired properties of the polypeptides of the invention, compared to the Nanobody of the invention per se. Some non-limiting examples of such amino acid sequences are serum proteins, such as human serum albumin (see for example WO 00/27435) or haptenic molecules (for example haptens that are recognized by circulating antibodies, see for example WO 98/22141).

[0873] In particular, it has been described in the art that linking fragments of immunoglobulins (such as V_{H} domains) to serum albumin or to fragments thereof can be used to increase the half-life. Reference is for made to WO 00/27435 and WO 01/077137). According to the invention, the Nanobody of the invention is preferably either directly linked to serum albumin (or to a suitable fragment thereof) or via a suitable linker, and in particular via a suitable peptide linked so that the polypeptide of the invention can be expressed as a genetic fusion (protein). According to one specific aspect, the Nanobody of the invention may be linked, to a fragment of serum albumin that at least comprises the domain III of serum albumin or part thereof. Reference is for example made to WO 07/112,940 of Ablynx N.V.

[0874] Alternatively, the further amino acid sequence may provide a second binding site or binding unit that is directed against a serum protein (such as, for example, human serum albumin or another serum protein such as IgG), so as to provide increased half-life in serum. Such amino acid sequences for example include the Nanobodies described below, as well as the small peptides and binding proteins described in WO 91/01743, WO 01/45746 and WO 02/076489 and the dAb's described in WO 03/002609 and WO 04/003019. Reference is also made to Harmsen et al., Vaccine, 23 (41); 4926-42, 2005, as well as to EP 0 368 684, as well as to WO 08/028,977, WO 08/043,821, WO 08/043,822 by Ablynx N.V. mentioned herein and WO 08/068,280 by Ablynx N.V.

[0875] Such amino acid sequences may in particular be directed against serum albumin (and more in particular human serum albumin) and/or against IgG (and more in particular human IgG). For example, such amino acid sequences may be amino acid sequences that are directed against (human) serum albumin and amino acid sequences that can bind to amino acid residues on (human) serum albumin that are not involved in binding of serum albumin to FcRn (see for example WO 06/0122787) and/or amino acid sequences that are capable of binding to amino acid residues on serum albumin that do not form part of domain III of serum albumin (see again for example WO 06/0122787); amino acid sequences that have or can provide an increased half-life (see for example WO 08/028,977); amino acid sequences against human serum albumin that are cross-reactive with serum albumin from at least one species of mammal, and in particular with at least one species of primate (such as, without limitation, monkeys from the genus Macaca (such as, and in particular, cynomologus monkeys (Macaca fascicularis) and/or rhesus monkeys (Macaca mulatta)) and baboon (Papio ursinus), reference is again made to WO 2008/028977); amino acid sequences that can bind to serum albumin in a pH independent manner (see for example WO2008/043821) and/or amino acid sequences that are conditional binders (see for example WO2008/043822).

[0876] According to another aspect, the one or more further amino acid sequences may comprise one or more parts, fragments or domains of conventional 4-chain antibodies (and in particular human antibodies) and/or of heavy chain antibodies. For example, although usually less preferred, a Nanobody of the invention may be linked to a conventional (preferably human) V_{H} or V_{L} domain or to a natural or synthetic analog of a V_{H} or V_{L} domain, again optionally via a linker sequence (including but not limited to other (single) domain antibodies, such as the dAb's described by Ward et al.).

[0877] The at least one Nanobody may also be linked to one or more (preferably human) C_{H}1, C_{H}2 and/or C_{H}3 domains, optionally via a linker sequence. For instance, a Nanobody linked to a suitable C_{H}1 domain could for example be used—together with suitable light chains—to generate antibody fragments/structures analogous to conventional Fab fragments or F(ab′)₂ fragments, but in which one or (in case of an F(ab′)₂ fragment) one or both of the conventional V_{H} domains have been replaced by a Nanobody of the invention. Also, two Nanobodies could be linked to a C_{H}3 domain (optionally via a linker) to provide a construct with increased half-life in vivo.

[0878] According to one specific aspect of a polypeptide of the invention, one or more Nanobodies of the invention may be linked (optionally via a suitable linker or hinge region) to one or more constant domains (for example, 2 or 3 constant domains that can be used as part of/to form an Fc portion), to an Fc portion and/or to one or more antibody parts, fragments or domains that confer one or more effector functions to the polypeptide of the invention and/or may confer the ability to bind to one or more Fc receptors. For example, for this purpose, and without being limited thereto, the one or more further amino acid sequences may comprise one or more C_{H}2 and/or C_{H}3 domains of an antibody, such as from a heavy chain antibody (as described herein) and more preferably from a conventional human 4-chain antibody; and/or may form (part of) and Fc region, for example from IgG (e.g. from IgG1, IgG2, IgG3 or IgG4), from IgE or from another human Ig such as IgA, IgD or IgM. For example, WO 94/04678 describes heavy chain antibodies comprising a Camelid V_{HH} domain or a humanized derivative thereof (i.e. a Nanobody), in which the Camelidae C_{H}2 and/or C_{H}3 domain have been replaced by human C_{H}2 and C_{H}3 domains, so as to provide an immunoglobulin that consists of 2 heavy chains each comprising a Nanobody and human C_{H}2 and C_{H}3 domains (but no C_{H}1 domain), which immunoglobulin has the effector function provided by the C_{H}2 and C_{H}3 domains and which immunoglobulin can function without the presence of any light chains. Other amino acid sequences that can be suitably linked to the Nanobodies of the invention so as to provide an effector function will be clear to the skilled person, and may be chosen on the basis of the desired effector function(s). Reference is for example made to WO 04/058820, WO 99/42077, WO 02/056910 and WO 05/017148, as well as the review by Holliger and Hudson, supra and to the U.S. provisional application 61/005,324 entitled “Constructs comprising single variable domains and an Fc portion derived from IgE” filed on Dec. 4, 2007 (see also the International patent application by Ablynx N.V. entitled “Constructs comprising single variable domains and an Fc portion derived from IgE” with the same filing date as the present application) which is incorporated herein by reference.

[0879] The amino acids sequences or Nanobodies of the invention may, for example, be linked to an Fc portion that is capable of effecting one or more IgE-mediated immune responses and/or that is capable of binding to either the FcεRI receptor and/or the FcεRII receptor. The amino acid sequences or Nanobodies of the invention may be linked, optionally via a suitable linker or hinge region, to one or more constant domains, in which the constant domains from the first polypeptide chain and the second polypeptide chains together form an Fc portion that is capable of effecting one or more IgE-mediated immune responses and/or that is capable of binding to either the FcεRI receptor and/or the FcεRII receptor. In a preferred aspect, the Fc portion is capable of binding to FcεRI with an affinity (expressed as the Kₐ value) better than 10⁶ M⁻¹, preferably better than 10⁸ M⁻¹, more preferably better than 10⁹ M⁻¹, such as with a Kₐ value of about 10¹⁰ M⁻¹ or 10¹¹ M⁻¹. More preferably the Fc portion is capable of binding to FcεRI even with an affinity (expressed as the Kₐ value) better than 10⁶ M⁻¹, preferably better than 10⁷ M⁻¹, such as with a Kₐ value of about 10⁸ M⁻¹. Such an Fc portion may comprises one or more parts, fragments, amino acid stretches or domains of the Fc portion of IgE, preferably one or more of those parts, fragments, amino acid stretches or domains of the Fc portion of IgE that allow IgE to bind to its receptors. Preferably the Fc portion at least comprises C_{ε}4 (or a suitable part of fragment thereof), and optionally also comprises C_{ε}3 (or a suitable part of fragment thereof) and/or C_{ε}2 (or a suitable part of fragment thereof). Even more preferably, the Fc portion essentially consist of three constant domains, preferably all or essentially all derived from human Fc portions.

[0880] Coupling of a Nanobody of the invention to an Fc portion may also lead to an increased half-life, compared to the corresponding Nanobody of the invention. For some applications, the use of an Fc portion and/or of constant domains (i.e. C_{H}2 and/or C_{H}3 domains) that confer increased half-life without any biologically significant effector function may also be suitable or even preferred. Other suitable constructs comprising one or more Nanobodies and one or more constant domains with increased half-life in vivo will be clear to the skilled person, and may for example comprise two Nanobodies linked to a C_{H}3 domain, optionally via a linker sequence. Generally, any fusion protein or derivatives with increased half-life will preferably have a molecular weight of more than 50 kD, the cut-off value for renal absorption.

[0881] In another one specific, but non-limiting, aspect, in order to form a polypeptide of the invention, one or more amino acid sequences of the invention may be linked (optionally via a suitable linker or hinge region) to naturally occurring, synthetic or semisynthetic constant domains (or analogs, variants, mutants, parts or fragments thereof) that have a reduced (or essentially no) tendency to self-associate into dimers (i.e. compared to constant domains that naturally occur in conventional 4-chain antibodies). Such monomeric (i.e. not self-associating) Fc chain variants, or fragments thereof, will be clear to the skilled person. For example, Helm et al., J Biol Chem 1996 271 7494, describe monomeric Fcε chain variants that can be used in the polypeptide chains of the invention.

[0882] Also, such monomeric Fc chain variants are preferably such that they are still capable of binding to the complement or the relevant Fc receptor(s) (depending on the Fc portion from which they are derived), and/or such that they still have some or all of the effector functions of the Fc portion from which they are derived (or at a reduced level still suitable for the intended use). Alternatively, in such a polypeptide chain of the invention, the monomeric Fc chain may be used to confer increased half-life upon the polypeptide chain, in which case the monomeric Fc chain may also have no or essentially no effector functions.

[0883] Bivalent/multivalent, bispecific/multispecific or biparatopic/multiparatopic polypeptides of the invention may also be linked to Fc portions, in order to provide polypeptide constructs of the type that is described in U.S. provisional application 61/005,331 entitled “Immunoglobulin constructs” filed on Dec. 4, 2007 (see also the International patent application by Ablynx N.V. entitled “Immunoglobulin constructs” with the same filing date as the present application) which is incorporated herein by reference.

[0884] The invention, for example also relates to compounds or constructs that comprises an Fc portion that is linked, optionally via a suitable linker or hinge region, to a pair of first amino acid sequences of the invention (preferably Nanobodies of the invention), which are linked, optionally via a suitable linker, to a pair of second amino acid sequences of the invention (preferably Nanobodies of the invention), wherein:
[0885] both of the first amino acid sequences of the invention (preferably Nanobodies of the invention) are directed against a first epitope, antigenic determinant, part, domain or subunit on HER2; and
[0886] both of the amino acid sequences of the invention (preferably Nanobodies of the invention) are directed against a second epitope, antigenic determinant, part, domain or subunit on HER2 which is the same or different from said first epitope, antigenic determinant, part, domain or subunit.
   Such compounds or constructs of the invention may, for example be directed against the Herceptin® binding site on HER-2 (and in particular against domain IV of HER2, and more in particular against the C-terminus of domain IV of HER2) and/or are compounds or constructs that are capable of competing with Herceptin® for binding to HER-2; they may be directed against the Omnitarg® binding site on HER-2 (and in particular against domain II of HER2, and more in particular against the middle of domain II of HER2) and/or are compounds or constructs that are capable of competing with Omnitarg® for binding to HER-2; or they may be directed against the Herceptin® binding site on HER-2 (and in particular against domain IV of HER2, and more in particular against the C-terminus of domain IV of HER2) and/or are compounds or constructs that are capable of competing with Herceptin® for binding to HER-2 and simultaneously be directed against the Omnitarg® binding site on HER-2 (and in particular against domain II of HER2, and more in particular against the middle of domain II of HER2) and/or are compounds or constructs that are capable of competing with Omnitarg® for binding to HER-2.

[0887] The further amino acid sequences may also form a signal sequence or leader sequence that directs secretion of the Nanobody or the polypeptide of the invention from a host cell upon synthesis (for example to provide a pre-, pro- or prepro-form of the polypeptide of the invention, depending on the host cell used to express the polypeptide of the invention).

[0888] The further amino acid sequence may also form a sequence or signal that allows the Nanobody or polypeptide of the invention to be directed towards and/or to penetrate or enter into specific organs, tissues, cells, or parts or compartments of cells, and/or that allows the Nanobody or polypeptide of the invention to penetrate or cross a biological barrier such as a cell membrane, a cell layer such as a layer of epithelial cells, a tumor including solid tumors, or the blood-brain-barrier. Suitable examples of such amino acid sequences will be clear to the skilled person, and for example include, but are not limited to, the “Peptrans” vectors mentioned above, the sequences described by Cardinale et al. and the amino acid sequences and antibody fragments known per se that can be used to express or produce the Nanobodies and polypeptides of the invention as so-called “intrabodies”, for example as described in WO 94/02610, WO 95/22618, U.S. Pat. No. 7,004,940, WO 03/014960, WO 99/07414; WO 05/01690; EP 1 512 696; and in Cattaneo, A. & Biocca, S. (1997) Intracellular Antibodies: Development and Applications. Landes and Springer-Verlag; and in Kontermann, Methods 34, (2004), 163-170, and the further references described therein.

[0889] For some applications, in particular for those applications in which it is intended to kill a cell that expresses the target against which the Nanobodies of the invention are directed (e.g. in the treatment of cancer), or to reduce or slow the growth and/or proliferation of such a cell, the Nanobodies of the invention may also be linked to a (cyto)toxic protein or polypeptide. Examples of such toxic proteins and polypeptides which can be linked to a Nanobody of the invention to provide—for example—a cytotoxic polypeptide of the invention will be clear to the skilled person and can for example be found in the prior art cited above and/or in the further description herein. One example is the so-called ADEPT™ technology described in WO 03/055527.

[0890] According to one preferred, but non-limiting aspect, said one or more further amino acid sequences comprise at least one further Nanobody, so as to provide a polypeptide of the invention that comprises at least two, such as three, four, five or more Nanobodies, in which said Nanobodies may optionally be linked via one or more linker sequences (as defined herein). Polypeptides of the invention that comprise two or more Nanobodies, of which at least one is a Nanobody of the invention, will also be referred to herein as “multivalent” polypeptides of the invention, and the Nanobodies present in such polypeptides will also be referred to herein as being in a “multivalent format”. For example a “bivalent” polypeptide of the invention comprises two Nanobodies, optionally linked via a linker sequence, whereas a “trivalent” polypeptide of the invention comprises three Nanobodies, optionally linked via two linker sequences; etc.; in which at least one of the Nanobodies present in the polypeptide, and up to all of the Nanobodies present in the polypeptide, is/are a Nanobody of the invention.

[0891] In a multivalent polypeptide of the invention, the two or more Nanobodies may be the same or different, and may be directed against the same antigen or antigenic determinant (for example against the same part(s) or epitope(s) or against different parts or epitopes) or may alternatively be directed against different antigens or antigenic determinants; or any suitable combination thereof. For example, a bivalent polypeptide of the invention may comprise (a) two identical Nanobodies; (b) a first Nanobody directed against a first antigenic determinant of a protein or antigen and a second Nanobody directed against the same antigenic determinant of said protein or antigen which is different from the first Nanobody; (c) a first Nanobody directed against a first antigenic determinant of a protein or antigen and a second Nanobody directed against another antigenic determinant of said protein or antigen; or (d) a first Nanobody directed against a first protein or antigen and a second Nanobody directed against a second protein or antigen (i.e. different from said first antigen). Similarly, a trivalent polypeptide of the invention may, for example and without being limited thereto. comprise (a) three identical Nanobodies; (b) two identical Nanobody against a first antigenic determinant of an antigen and a third Nanobody directed against a different antigenic determinant of the same antigen; (c) two identical Nanobody against a first antigenic determinant of an antigen and a third Nanobody directed against a second antigen different from said first antigen; (d) a first Nanobody directed against a first antigenic determinant of an antigen, a second Nanobody directed against a second antigenic determinant of said antigen and a third Nanobody directed against a third antigenic determinant of the same antigen; (e) a first Nanobody directed against a first antigenic determinant of a first antigen, a second Nanobody directed against a second antigenic determinant of said first antigen and a third Nanobody directed against a second antigen different from said first antigen; or (f) a first Nanobody directed against a first antigen, a second Nanobody directed against a second antigen different from said first antigen, and a third Nanobody directed against a third antigen different from said first and second antigen.

[0892] Polypeptides of the invention that contain at least two Nanobodies, in which at least one Nanobody is directed against a first antigenic determinant on HER2 and at least one Nanobody is directed against a second antigenic determinant on HER2 will also be referred to as “multiparatopic” polypeptides of the invention, and the Nanobodies present in such polypeptides will also be referred to herein as being in a “multiparatopic format”. Thus, for example, a “biparatopic” polypeptide of the invention is a polypeptide that comprises at least one Nanobody directed against a first antigenic determinant on HER2 and at least one further Nanobody directed against a second antigenic determinant on HER2, whereas a “triparatopic” polypeptide of the invention is a polypeptide that comprises at least one Nanobody directed against a first antigenic determinant on HER2, at least one further Nanobody directed against a second antigenic determinant on HER2 and at least one further Nanobody directed against a third antigenic determinant on HER2; etc.

[0893] Accordingly, in its simplest form, a biparatopic polypeptide of the invention is a bivalent polypeptide of the invention (as defined herein), comprising a first Nanobody directed against a first antigenic determinant on HER2, and a second Nanobody directed against a second antigenic determinant on HER2, in which said first and second Nanobody may optionally be linked via a linker sequence (as defined herein); whereas a triparatopic polypeptide of the invention in its simplest form is a trivalent polypeptide of the invention (as defined herein), comprising a first Nanobody directed against a first antigenic determinant on HER2, a second. Nanobody directed against a second antigenic determinant on HER2 and a third Nanobody directed against a third antigenic determinant on HER2, in which said first, second and third Nanobody may optionally be linked via one or more, and in particular one and more, in particular two, linker sequences.

[0894] However, as will be clear from the description hereinabove, the invention is not limited thereto, in the sense that a multiparatopic polypeptide of the invention may comprise at least one Nanobody against a first antigenic determinant on HER2, and any number of Nanobodies directed against one or more other antigenic determinants on HER2.

[0895] Polypeptides of the invention that contain at least two Nanobodies, in which at least one Nanobody is directed against a first antigen (i.e. against HER2) and at least one Nanobody is directed against a second antigen (i.e. different from HER2), will also be referred to as “multispecific” polypeptides of the invention, and the Nanobodies present in such polypeptides will also be referred to herein as being in a “multispecific format”. Thus, for example, a “bispecific” polypeptide of the invention is a polypeptide that comprises at least one Nanobody directed against a first antigen (i.e. HER2) and at least one further Nanobody directed against a second antigen (i.e. different from HER2), whereas a “trispecific” polypeptide of the invention is a polypeptide that comprises at least one Nanobody directed against a first antigen (i.e. HER2), at least one further Nanobody directed against a second antigen (i.e. different from HER2) and at least one further Nanobody directed against a third antigen (i.e. different from both HER2, and the second antigen); etc.

[0896] Accordingly, in its simplest form, a bispecific polypeptide of the invention is a bivalent polypeptide of the invention (as defined herein), comprising a first Nanobody directed against HER2, and a second Nanobody directed against a second antigen, in which said first and second Nanobody may optionally be linked via a linker sequence (as defined herein); whereas a trispecific polypeptide of the invention in its simplest form is a trivalent polypeptide of the invention (as defined herein), comprising a first Nanobody directed against HER2, a second Nanobody directed against a second antigen and a third Nanobody directed against a third antigen, in which said first, second and third Nanobody may optionally be linked via one or more, and in particular one and more, in particular two, linker sequences.

[0897] However, as will be clear from the description hereinabove, the invention is not limited thereto, in the sense that a multispecific polypeptide of the invention may comprise at least one Nanobody against HER2, and any number of Nanobodies directed against one or more antigens different from HER2.

[0898] Furthermore, although it is encompassed within the scope of the invention that the specific order or arrangement of the various Nanobodies in the polypeptides of the invention may have some influence on the properties of the final polypeptide of the invention (including but not limited to the affinity, specificity or avidity for HER2, or against the one or more other antigens), said order or arrangement is usually not critical and may be suitably chosen by the skilled person, optionally after some limited routine experiments based on the disclosure herein. Thus, when reference is made to a specific multivalent or multispecific polypeptide of the invention, it should be noted that this encompasses any order or arrangements of the relevant Nanobodies, unless explicitly indicated otherwise.

[0899] Finally, it is also within the scope of the invention that the polypeptides of the invention contain two or more Nanobodies and one or more further amino acid sequences (as mentioned herein).

[0900] For multivalent and multispecific polypeptides containing one or more V_{HH} domains and their preparation, reference is also made to Conrath et al., J. Biol. Chem., Vol. 276, 10. 7346-7350, 2001; Muyldermans, Reviews in Molecular Biotechnology 74 (2001), 277-302; as well as to for example WO 96/34103 and WO 99/23221. Some other examples of some specific multispecific and/or multivalent polypeptide of the invention can be found in the applications by Ablynx N.V. referred to herein.

[0901] One preferred, but non-limiting example of a multispecific polypeptide of the invention comprises at least one Nanobody of the invention and at least one Nanobody that provides for an increased half-life. Such Nanobodies may for example be Nanobodies that are directed against a serum protein, and in particular a human serum protein, such as human serum albumin, thyroxine-binding protein, (human) transferrin, fibrinogen, an immunoglobulin such as IgG, IgE or IgM, or against one of the serum proteins listed in WO 04/003019. Of these, Nanobodies that can bind to serum albumin (and in particular human serum albumin) or to IgG (and in particular human IgG, see for example Nanobody VH-1 described in the review by Muyldermans, supra) are particularly preferred (although for example, for experiments in mice or primates, Nanobodies against or cross-reactive with mouse serum albumin (MSA) or serum albumin from said primate, respectively, can be used. However, for pharmaceutical use, Nanobodies against human serum albumin or human IgG will usually be preferred). Nanobodies that provide for increased half-life and that can be used in the polypeptides of the invention include the Nanobodies directed against serum albumin that are described in WO 04/041865, in WO 06/122787 and in the further patent applications by Ablynx N.V., such as those mentioned above.

[0902] For example, the some preferred Nanobodies that provide for increased half-life for use in the present invention include Nanobodies that can bind to amino acid residues on (human) serum albumin that are not involved in binding of serum albumin to FcRn (see for example WO 06/0122787); Nanobodies that are capable of binding to amino acid residues on serum albumin that do not form part of domain III of serum albumin (see for example WO 06/0122787); Nanobodies that have or can provide an increased half-life (see for example WO 08/028,977 by Ablynx N.V.); Nanobodies against human serum albumin that are cross-reactive with serum albumin from at least one species of mammal, and in particular with at least one species of primate (such as, without limitation, monkeys from the genus Macaca (such as, and in particular, cynomologus monkeys (Macaca fascicularis) and/or rhesus monkeys (Macaca mulatta)) and baboon (Papio ursinus)) (see for example WO 08/028,977 by Ablynx N.V.); Nanobodies that can bind to serum albumin in a pH independent manner (see for example WO 08/043,821 by Ablynx N.V.) and/or Nanobodies that are conditional binders (see for example WO 08/043,822 by Ablynx N.V.).

[0903] Some particularly preferred Nanobodies that provide for increased half-life and that can be used in the polypeptides of the invention include the Nanobodies ALB-1 to ALB-10 disclosed in WO 06/122787 (see Tables II and III) of which ALB-8 (SEQ ID NO: 62 in WO 06/122787) is particularly preferred.

[0904] Some preferred, but non-limiting examples of polypeptides of the invention that comprise at least one Nanobody of the invention and at least one Nanobody that provides for increased half-life are given in SEQ ID NOs: 2331-2335.

[0905] According to a specific, but non-limiting aspect of the invention, the polypeptides of the invention contain, besides the one or more Nanobodies of the invention, at least one Nanobody against human serum albumin.

[0906] Generally, any polypeptides of the invention with increased half-life that contain one or more Nanobodies of the invention, and any derivatives of Nanobodies of the invention or of such polypeptides that have an increased half-life, preferably have a half-life that is at least 1.5 times, preferably at least 2 times, such as at least 5 times, for example at least 10 times or more than 20 times, greater than the half-life of the corresponding Nanobody of the invention per se. For example, such a derivative or polypeptides with increased half-life may have a half-life that is increased with more than 1 hours, preferably more than 2 hours, more preferably more than 6 hours, such as more than 12 hours, or even more than 24, 48 or 72 hours, compared to the corresponding Nanobody of the invention per se.

[0907] In a preferred, but non-limiting aspect of the invention, such derivatives or polypeptides may exhibit a serum half-life in human of at least about 12 hours, preferably at least 24 hours, more preferably at least 48 hours, even more preferably at least 72 hours or more. For example, such derivatives or polypeptides may have a half-life of at least 5 days (such as about 5 to 10 days), preferably at least 9 days (such as about 9 to 14 days), more preferably at least about 10 days (such as about 10 to 15 days), or at least about 11 days (such as about 11 to 16 days), more preferably at least about 12 days (such as about 12 to 18 days or more), or more than 14 days (such as about 14 to 19 days).

[0908] According to one aspect of the invention the polypeptides are capable of binding to one or more molecules which can increase the half-life of the polypeptide in vivo.

[0909] The polypeptides of the invention are stabilised in vivo and their half-life increased by binding to molecules which resist degradation and/or clearance or sequestration. Typically, such molecules are naturally occurring proteins which themselves have a long half-life in vivo.

[0910] Another preferred, but non-limiting example of a multispecific polypeptide of the invention comprises at least one Nanobody of the invention and at least one Nanobody that directs the polypeptide of the invention towards, and/or that allows the polypeptide of the invention to penetrate or to enter into specific organs, tissues, cells, or parts or compartments of cells, and/or that allows the Nanobody to penetrate or cross a biological barrier such as a cell membrane, a cell layer such as a layer of epithelial cells, a tumor including solid tumors, or the blood-brain-barrier. Examples of such Nanobodies include Nanobodies that are directed towards specific cell-surface proteins, markers or epitopes of the desired organ, tissue or cell (for example cell-surface markers associated with tumor cells), and the single-domain brain targeting antibody fragments described in WO 02/057445 and WO 06/040153, of which FC44 (SEQ ID NO: 189 of WO 06/040153) and FC5 (SEQ ID NO: 190 of WO 06/040154) are preferred examples.

[0911] In the polypeptides of the invention, the one or more Nanobodies and the one or more polypeptides may be directly linked to each other (as for example described in WO 99/23221) and/or may be linked to each other via one or more suitable spacers or linkers, or any combination thereof.

[0912] Suitable spacers or linkers for use in multivalent, multiparatopic and multispecific polypeptides will be clear to the skilled person, and may generally be any linker or spacer used in the art to link amino acid sequences. Preferably, said linker or spacer is suitable for use in constructing proteins or polypeptides that are intended for pharmaceutical use.

[0913] Some particularly preferred spacers include the spacers and linkers that are used in the art to link antibody fragments or antibody domains. These include the linkers mentioned in the general background art cited above, as well as for example linkers that are used in the art to construct diabodies or ScFv fragments (in this respect, however, its should be noted that, whereas in diabodies and in ScFv fragments, the linker sequence used should have a length, a degree of flexibility and other properties that allow the pertinent V_{H} and V_{L} domains to come together to form the complete antigen-binding site, there is no particular limitation on the length or the flexibility of the linker used in the polypeptide of the invention, since each Nanobody by itself forms a complete antigen-binding site).

[0914] For example, a linker may be a suitable amino acid sequence, and in particular amino acid sequences of between 1 and 75, preferably between 1 and 60, more preferably between 1 and 50, even more preferably between 1 and 30, such as between 1 and 10 amino acid residues. Some preferred examples of such amino acid sequences include gly-ser linkers, for example of the type (glyₓser_{y})_{z}, such as (for example (gly₄ser)₃ or (gly₃ser₂)₃, as described in WO 99/42077 and the GS30, GS15, GS9 and GS7 linkers described in the applications by Ablynx mentioned herein (see for example WO 06/040153 and WO 06/122825), as well as hinge-like regions, such as the hinge regions of naturally occurring heavy chain antibodies or similar sequences (such as described in WO 94/04678).

[0915] Some other particularly preferred linkers are poly-alanine (such as AAA), as well as the linkers GS35, GS30 (SEQ ID NO: 85 in WO 06/122825) and GS9 (SEQ ID NO: 84 in WO 06/122825).

[0916] Other suitable linkers generally comprise organic compounds or polymers, in particular those suitable for use in proteins for pharmaceutical use. For instance, polyethyleneglycol) moieties have been used to link antibody domains, see for example WO 04/081026.

[0917] It is encompassed within the scope of the invention that the length, the degree of flexibility and/or other properties of the linker(s) used (although not critical, as it usually is for linkers used in ScFv fragments) may have some influence on the properties of the final polypeptide of the invention, including but not limited to the affinity, specificity or avidity for HER2, or for one or more of the other antigens. Based on the disclosure herein, the skilled person will be able to determine the optimal linker(s) for use in a specific polypeptide of the invention, optionally after some limited routine experiments.

[0918] For example, in multivalent polypeptides of the invention that comprise Nanobodies directed against a multimeric antigen (such as a multimeric receptor or other protein), the length and flexibility of the linker are preferably such that it allows each Nanobody of the invention present in the polypeptide to bind to the antigenic determinant on each of the subunits of the multimer.

[0919] Similarly, in a multiparatopic polypeptide of the invention that comprises Nanobodies directed against two or more different antigenic determinants on the same antigen (for example against different epitopes of an antigen and/or against different subunits of a multimeric receptor or protein), the length and flexibility of the linker are preferably such that, when the multiparatopic polypeptide binds to HER-2, at least two and preferably all of the Nanobodies that are present in the multiparatopic polypeptide can (simultaneously) bind to each of their intended antigenic determinants, epitopes, parts or domains, most preferably so as to allow binding with increased avidity and also intramolecular binding and/or recognition. Again, based on the disclosure herein, the skilled person will be able to determine the optimal linker(s) for use in a specific polypeptide of the invention, optionally after some limited routine experiments.

[0920] For example, as further described herein, some of the most preferred multiparatopic polypeptides of the invention comprise (i) at least one amino acid sequence of the invention (and in particular at least one Nanobody) that is directed against the Omnitarg binding site on HER2 (and in particular against domain II of HER2, and more in particular against the middle of domain II of HER2) and/or that is capable of competing with Omnitarg for binding to HER-2; and at least one amino acid sequence of the invention (and in particular at least one Nanobody) that is directed against the Herceptin® binding site on HER2 (and in particular against domain IV of HER2, and more in particular against the C-terminus of domain IV of HER2) and/or that is capable of competing with Herceptin® for binding to HER-2. In such a preferred multiparatopic polypeptide of the invention, the linker is most preferably such that the multiparatopic polypeptide of the invention is capable of (simultaneously) binding to both the Omnitarg binding site on HER2 (and in particular against domain II of HER2, and more in particular against the middle of domain of HER2) as well as the Herceptin® binding site on HER2 (and in particular against domain IV of HER2, and more in particular against the C-terminus of domain IV of HER2), again most preferably so as to allow binding with increased avidity and also intramolecular binding and/or recognition. Such multiparatopic polypeptides of the invention with such a linker form a particularly preferred aspect of the invention, and examples of such a linker are given in the Examples below. For example, when such a linker is a Gly-Ser linker (for example, a Gly-Ser linker as described in the Examples), it preferably has a length of at least 15 amino acid residues, such as at least 20 or at least 30 amino acid residues. The maximum length is not especially critical, but for practical considerations (such as ease of cloning and expression) the linker is preferably no longer than 75 amino acid residues, more preferably less than 50 amino acid residues. For example, Gly-Ser linkers (such as the Gly-Ser linkers as described in the Examples) of between 20 and 40 amino acid residues, such as about 25, 30 or 35 amino acid residues, may be particularly suited. Based on the disclosure herein, the skilled person will be able to determine other suitable linkers, it being understood that the optimal length of each linker may also depend on the amino acid composition of the linker that is envisaged for use.

[0921] Optimal linker lengths in biparatopic, triparatopic or multiparatopic polypeptides of the invention can, for example, be designed in silico with any method for protein design known in the art or disclosed herein (see, e.g. the Example section). Optimal linker lengths, far example obtained by in silico design, can further be verified experimentally by binding and competition assays as will be known to the skilled person and/or described herein (see e.g. the example section). Optimal linker lengths in biparatopic, triparatopic or multiparatopic polypeptides may also be determined using the screening method for determining optimal linker length as described herein.

[0922] The choice of linker length in biparatopic, triparatopic or multiparatopic polypeptides of the invention can also be such that only a limited epitope space on the antigen is covered. Linker length restriction can, for example, help to avoid targeting epitopes which should not be neutralized (e.g. those essential for a function of the antigen) or to target regions relatively adjacent to a first ‘guiding’ Nanobody.

[0923] The choice of the format (N- or C-terminal position of the different Nanobodies) of the biparatopic, triparatopic or multiparatopic polypeptides of the invention and linker length can also be used to obtain molecules that bind avidly to the target antigen (via two, or more, binding sites), yet are purposely not agonistic. By optimising the format and linker length and composition, the binding sites can be positioned in such way that simultaneous binding of two or more Nanobodies to the same target antigen (i.e. intramolecular binding) will be highly favoured compared to binding to separate antigens in proximity of one another (intermolecular binding, such as e.g. on a cell surface). This could, for example, reduce the chance on agonism (which might not be desired in a good therapeutic compound). Screening and/or selection methods and assays are known to the skilled person and/or described herein that allow for the isolation of avidly binding domains positioned in relation to one another and to the antigen of interest in such way as to have an antagonistic function only.

[0924] In another aspect of the invention, biparatopic, triparatopic or multiparatopic polypeptides of the invention can also be selected to be purposely agonistic. For example, a combination of two identical or two different Nanobodies that bind to the Herceptin®-binding site and are genetically fused to one another can be agonistic (e.g. 2D3-2D3 or 2D3 fused to other Herceptin®-competing Nanobodies). The current invention also provides a way to select for such agonistic biparatopic, triparatopic or multiparatopic polypeptides of the invention using appropriate screening and/or selection procedures of members of multiparatopic libraries. Agonists could, for example, be desired and/or interesting for triggering certain receptors.

[0925] It is also within the scope of the invention that the linker(s) used confer one or more other favourable properties or functionality to the polypeptides of the invention, and/or provide one or more sites for the formation of derivatives and/or for the attachment of functional groups (e.g. as described herein for the derivatives of the Nanobodies of the invention). For example, linkers containing one or more charged amino acid residues (see Table A-2 above) can provide improved hydrophilic properties, whereas linkers that form or contain small epitopes or tags can be used for the purposes of detection, identification and/or purification. Again, based on the disclosure herein, the skilled person will be able to determine the optimal linkers for use in a specific polypeptide of the invention, optionally after some limited routine experiments.

[0926] Finally, when two or more linkers are used in the polypeptides of the invention, these linkers may be the same or different. Again, based on the disclosure herein, the skilled person will be able to determine the optimal linkers for use in a specific polypeptide of the invention, optionally after some limited routine experiments.

[0927] Usually, for easy of expression and production, a polypeptide of the invention will be a linear polypeptide. However, the invention in its broadest sense is not limited thereto. For example, when a polypeptide of the invention comprises three of more Nanobodies, it is possible to link them by use of a linker with three or more “arms”, which each “arm” being linked to a Nanobody, so as to provide a “star-shaped” construct. It is also possible, although usually less preferred, to use circular constructs.

[0928] The invention also comprises derivatives of the polypeptides of the invention, which may be essentially analogous to the derivatives of the Nanobodies of the invention, i.e. as described herein.

[0929] The invention also comprises proteins or polypeptides that “essentially consist” of a polypeptide of the invention (in which the wording “essentially consist of” has essentially the same meaning as indicated hereinabove).

[0930] According to one aspect of the invention, the polypeptide of the invention is in essentially isolated from, as defined herein.

[0931] The amino acid sequences, Nanobodies, polypeptides and nucleic acids of the invention can be prepared in a manner known per se, as will be clear to the skilled person from the further description herein. For example, the Nanobodies and polypeptides of the invention can be prepared in any manner known per se for the preparation of antibodies and in particular for the preparation of antibody fragments (including but not limited to (single) domain antibodies and ScFv fragments). Some preferred, but non-limiting methods for preparing the amino acid sequences, Nanobodies, polypeptides and nucleic acids include the methods and techniques described herein.

[0932] As will be clear to the skilled person, one particularly useful method for preparing an amino acid sequence, Nanobody and/or a polypeptide of the invention generally comprises the steps of:
[0933] i) the expression, in a suitable host cell or host organism (also referred to herein as a “host of the invention”) or in another suitable expression system of a nucleic acid that encodes said amino acid sequence, Nanobody or polypeptide of the invention (also referred to herein as a “nucleic acid of the invention”), optionally followed by:
[0934] ii) isolating and/or purifying the amino acid sequence, Nanobody or polypeptide of the invention thus obtained.

[0935] In particular, such a method may comprise the steps of:
[0936] i) cultivating and/or maintaining a host of the invention under conditions that are such that said host of the invention expresses and/or produces at least one amino acid sequence, Nanobody and/or polypeptide of the invention; optionally followed by:
[0937] ii) isolating and/or purifying the amino acid sequence, Nanobody or polypeptide of the invention thus obtained.

[0938] A nucleic acid of the invention can be in the form of single or double stranded DNA or RNA, and is preferably in the form of double stranded DNA. For example, the nucleotide sequences of the invention may be genomic DNA, cDNA or synthetic DNA (such as DNA with a codon usage that has been specifically adapted for expression in the intended host cell or host organism).

[0939] According to one aspect of the invention, the nucleic acid of the invention is in essentially isolated from, as defined herein.

[0940] The nucleic acid of the invention may also be in the form of, be present in and/or be part of a vector, such as for example a plasmid, cosmid or YAC, which again may be in essentially isolated form.

[0941] The nucleic acids of the invention can be prepared or obtained in a manner known per se, based on the information on the amino acid sequences for the polypeptides of the invention given herein, and/or can be isolated from a suitable natural source. To provide analogs, nucleotide sequences encoding naturally occurring V_{HH} domains can for example be subjected to site-directed mutagenesis, so at to provide a nucleic acid of the invention encoding said analog. Also, as will be clear to the skilled person, to prepare a nucleic acid of the invention, also several nucleotide sequences, such as at least one nucleotide sequence encoding a Nanobody and for example nucleic acids encoding one or more linkers can be linked together in a suitable manner.

[0942] Techniques for generating the nucleic acids of the invention will be clear to the skilled person and may for instance include, but are not limited to, automated DNA synthesis; site-directed mutagenesis; combining two or more naturally occurring and/or synthetic sequences (or two or more parts thereof), introduction of mutations that lead to the expression of a truncated expression product; introduction of one or more restriction sites (e.g. to create cassettes and/or regions that may easily be digested and/or ligated using suitable restriction enzymes), and/or the introduction of mutations by means of a PCR reaction using one or more “mismatched” primers, using for example a sequence of a naturally occurring form of HER2 as a template. These and other techniques will be clear to the skilled person, and reference is again made to the standard handbooks, such as Sambrook et al. and Ausubel et al., mentioned above, as well as the Examples below.

[0943] The nucleic acid of the invention may also be in the form of, be present in and/or be part of a genetic construct, as will be clear to the person skilled in the art. Such genetic constructs generally comprise at least one nucleic acid of the invention that is optionally linked to one or more elements of genetic constructs known per se, such as for example one or more suitable regulatory elements (such as a suitable promoter(s), enhancer(s), terminator(s), etc.) and the further elements of genetic constructs referred to herein. Such genetic constructs comprising at least one nucleic acid of the invention will also be referred to herein as “genetic constructs of the invention”.

[0944] The genetic constructs of the invention may be DNA or RNA, and are preferably double-stranded DNA. The genetic constructs of the invention may also be in a form suitable for transformation of the intended host cell or host organism, in a form suitable for integration into the genomic DNA of the intended host cell or in a form suitable for independent replication, maintenance and/or inheritance in the intended host organism. For instance, the genetic constructs of the invention may be in the form of a vector, such as for example a plasmid, cosmid, YAC, a viral vector or transposon. In particular, the vector may be an expression vector, i.e. a vector that can provide for expression in vitro and/or in vivo (e.g. in a suitable host cell, host organism and/or expression system).

[0945] In a preferred but non-limiting aspect, a genetic construct of the invention comprises
[0946] i) at least one nucleic acid of the invention; operably connected to
[0947] ii) one or more regulatory elements, such as a promoter and optionally a suitable terminator;
   and optionally also
[0948] iii) one or more further elements of genetic constructs known per se;
   in which the terms “regulatory element”, “promoter”, “terminator” and “operably connected” have their usual meaning in the art (as further described herein); and in which said “further elements” present in the genetic constructs may for example be 3′- or 5′-UTR sequences, leader sequences, selection markers, expression markers/reporter genes, and/or elements that may facilitate or increase (the efficiency of) transformation or integration. These and other suitable elements for such genetic constructs will be clear to the skilled person, and may for instance depend upon the type of construct used, the intended host cell or host organism; the manner in which the nucleotide sequences of the invention of interest are to be expressed (e.g. via constitutive, transient or inducible expression); and/or the transformation technique to be used. For example, regulatory sequences, promoters and terminators known per se for the expression and production of antibodies and antibody fragments (including but not limited to (single) domain antibodies and ScFv fragments) may be used in an essentially analogous manner.

[0949] Preferably, in the genetic constructs of the invention, said at least one nucleic acid of the invention and said regulatory elements, and optionally said one or more further elements, are “operably linked” to each other, by which is generally meant that they are in a functional relationship with each other. For instance, a promoter is considered “operably linked” to a coding sequence if said promoter is able to initiate or otherwise control/regulate the transcription and/or the expression of a coding sequence (in which said coding sequence should be understood as being “under the control of” said promotor). Generally, when two nucleotide sequences are operably linked, they will be in the same orientation and usually also in the same reading frame. They will usually also be essentially contiguous, although this may also not be required.

[0950] Preferably, the regulatory and further elements of the genetic constructs of the invention are such that they are capable of providing their intended biological function in the intended host cell or host organism.

[0951] For instance, a promoter, enhancer or terminator should be “operable” in the intended host cell or host organism, by which is meant that (for example) said promoter should be capable of initiating or otherwise controlling/regulating the transcription and/or the expression of a nucleotide sequence—e.g. a coding sequence—to which it is operably linked (as defined herein).

[0952] Some particularly preferred promoters include, but are not limited to, promoters known per se for the expression in the host cells mentioned herein; and in particular promoters for the expression in the bacterial cells, such as those mentioned herein and/or those used in the Examples.

[0953] A selection marker should be such that it allows—i.e. under appropriate selection conditions—host cells and/or host organisms that have been (successfully) transformed with the nucleotide sequence of the invention to be distinguished from host cells/organisms that have not been (successfully) transformed. Some preferred, but non-limiting examples of such markers are genes that provide resistance against antibiotics (such as kanamycin or ampicillin), genes that provide for temperature resistance, or genes that allow the host cell or host organism to be maintained in the absence of certain factors, compounds and/or (food) components in the medium that are essential for survival of the non-transformed cells or organisms.

[0954] A leader sequence should be such that—in the intended host cell or host organism—it allows for the desired post-translational modifications and/or such that it directs the transcribed mRNA to a desired part or organelle of a cell. A leader sequence may also allow for secretion of the expression product from said cell. As such, the leader sequence may be any pro-, pre-, or prepro-sequence operable in the host cell or host organism. Leader sequences may not be required for expression in a bacterial cell. For example, leader sequences known per se for the expression and production of antibodies and antibody fragments (including but not limited to single domain antibodies and ScFv fragments) may be used in an essentially analogous manner.

[0955] An expression marker or reporter gene should be such that—in the host cell or host organism—it allows for detection of the expression of (a gene or nucleotide sequence present on) the genetic construct. An expression marker may optionally also allow for the localisation of the expressed product, e.g. in a specific part or organelle of a cell and/or in (a) specific cell(s), tissue(s), organ(s) or part(s) of a multicellular organism. Such reporter genes may also be expressed as a protein fusion with the amino acid sequence of the invention. Some preferred, but non-limiting examples include fluorescent proteins such as GFP.

[0956] Some preferred, but non-limiting examples of suitable promoters, terminator and further elements include those that can be used for the expression in the host cells mentioned herein; and in particular those that are suitable for expression in bacterial cells, such as those mentioned herein and/or those used in the Examples below. For some (further) non-limiting examples of the promoters, selection markers, leader sequences, expression markers and further elements that may be present/used in the genetic constructs of the invention—such as terminators, transcriptional and/or translational enhancers and/or integration factors—reference is made to the general handbooks such as Sambrook et al. and Ausubel et al. mentioned above, as well as to the examples that are given in WO 95/07463, WO 96/23810, WO 95/07463, WO 95/21191, WO 97/11094, WO 97/42320. WO 98/06737, WO 98/21355, U.S. Pat. No. 7,207,410, U.S. Pat. No. 5,693,492 and EP 1 085 089. Other examples will be clear to the skilled person. Reference is also made to the general background art cited above and the further references cited herein.

[0957] The genetic constructs of the invention may generally be provided by suitably linking the nucleotide sequence(s) of the invention to the one or more further elements described above, for example using the techniques described in the general handbooks such as Sambrook et al. and Ausubel et al., mentioned above.

[0958] Often, the genetic constructs of the invention will be obtained by inserting a nucleotide sequence of the invention in a suitable (expression) vector known per se. Some preferred, but non-limiting examples of suitable expression vectors are those used in the Examples below, as well as those mentioned herein.

[0959] The nucleic acids of the invention and/or the genetic constructs of the invention may be used to transform a host cell or host organism, i.e. for expression and/or production of the amino acid sequence, Nanobody or polypeptide of the invention. Suitable hosts or host cells will be clear to the skilled person, and may for example be any suitable fungal, prokaryotic or eukaryotic cell or cell line or any suitable fungal, prokaryotic or eukaryotic organism, for example:
[0960] a bacterial strain, including but not limited to gram-negative strains such as strains of Escherichia coli; of Proteus, for example of Proteus mirabilis; of Pseudomonas, for example of Pseudomonas fluorescens; and gram-positive strains such as strains of Bacillus, for example of Bacillus subtilis or of Bacillus brevis; of Streptomyces, for example of Streptomyces lividans; of Staphylococcus, for example of Staphylococcus carnosus; and of Lactococcus, for example of Lactococcus lactis;
[0961] a fungal cell, including but not limited to cells from species of Trichoderma, for example from Trichoderma reesei; of Neurospora, for example from Neurospora crassa; of Sordaria, for example from Sordaria macrospora; of Aspergillus, for example from Aspergillus niger or from Aspergillus sojae; or from other filamentous fungi;
[0962] a yeast cell, including but not limited to cells from species of Saccharomyces, for example of Saccharomyces cerevisiae; of Schizosaccharomyces, for example of Schizosaccharomyces pombe; of Pichia, for example of Pichia pastoris or of Pichia methanolica; of Hansenula, for example of Hansenula polymorpha; of Kluyveromyces, for example of Kluyveromyces lactis; of Arxula, for example of Arxula adeninivorans; of Yarrowia, for example of Yarrowia lipolytica;
[0963] an amphibian cell or cell line, such as Xenopus oocytes;
[0964] an insect-derived cell or cell line, such as cells/cell lines derived from lepidoptera, including but not limited to Spodoptera SF9 and Sf21 cells or cells/cell lines derived from Drosophila, such as Schneider and Kc cells;
[0965] a plant or plant cell, for example in tobacco plants; and/or
[0966] a mammalian cell or cell line, for example a cell or cell line derived from a human, a cell or a cell line from mammals including but not limited to CHO-cells, BHK-cells (for example BHK-21 cells) and human cells or cell lines such as HeLa, COS (for example COS-7) and PER.C6 cells;
   as well as all other hosts or host cells known per se for the expression and production of antibodies and antibody fragments (including but not limited to (single) domain antibodies and ScFv fragments), which will be clear to the skilled person. Reference is also made to the general background art cited hereinabove, as well as to for example WO 94/29457; WO 96/34103; WO 99/42077; Frenken et al., (1998), supra; Riechmann and Muyldermans, (1999), supra; van der Linden, (2000), supra; Thomassen et al., (2002), supra; Joosten et al., (2003), supra; Joosten et al., (2005), supra; and the further references cited herein.

[0967] The amino acid sequences, Nanobodies and polypeptides of the invention can also be introduced and expressed in one or more cells, tissues or organs of a multicellular organism, for example for prophylactic and/or therapeutic purposes (e.g. as a gene therapy). For this purpose, the nucleotide sequences of the invention may be introduced into the cells or tissues in any suitable way, for example as such (e.g. using liposomes) or after they have been inserted into a suitable gene therapy vector (for example derived from retroviruses such as adenovirus, or parvoviruses such as adeno-associated virus). As will also be clear to the skilled person, such gene therapy may be performed in vivo and/or in situ in the body of a patient by administering a nucleic acid of the invention or a suitable gene therapy vector encoding the same to the patient or to specific cells or a specific tissue or organ of the patient; or suitable cells (often taken from the body of the patient to be treated, such as explanted lymphocytes, bone marrow aspirates or tissue biopsies) may be treated in vitro with a nucleotide sequence of the invention and then be suitably (re-)introduced into the body of the patient. All this can be performed using gene therapy vectors, techniques and delivery systems which are well known to the skilled person, and for example described in Culver, K. W., “Gene Therapy”, 1994, p. xii, Mary Ann Liebert, Inc., Publishers, New York, N.Y.); Giordano, Nature F Medicine 2 (1996), 534-539; Schaper, Circ. Res. 79 (1996), 911-919; Anderson, Science 256 (1992), 808-813; Verma, Nature 389 (1994), 239; Isner, Lancet 348 (1996), 370-374; Muhlhauser, Circ. Res. 77 (1995), 1077-1086; Onodera, Blood 91; (1998), 30-36; Verma, Gene Ther. 5 (1998), 692-699; Nabel, Ann. N.Y. Acad. Sci.; 811 (1997), 289-292; Verzeletti, Hum. Gene Ther. 9 (1998), 2243-51; Wang, Nature Medicine 2 (1996), 714-716; WO 94/29469; WO 97/00957, U.S. Pat. No. 5,580,859; U.S. Pat. No. 5,589,546; or Schaper, Current Opinion in Biotechnology 7 (1996), 635-640. For example, in situ expression of ScFv fragments (Afanasieva et al., Gene Ther., 10, 1850-1859 (2003)) and of diabodies (Blanco et al., J. Immunol, 171, 1070-1077 (2003)) has been described in the art.

[0968] For expression of the Nanobodies in a cell, they may also be expressed as so-called “intrabodies”, as for example described in WO 94/02610, WO 95/22618 and U.S. Pat. No. 7,004,940; WO 03/014960; in Cattaneo, A. & Biocca, S. (1997) Intracellular Antibodies: Development and Applications. Landes and Springer-Verlag; and in Kontermann, Methods 34, (2004), 163-170.

[0969] The amino acid sequences, Nanobodies and polypeptides of the invention can for example also be produced in the milk of transgenic mammals, for example in the milk of rabbits, cows, goats or sheep (see for example U.S. Pat. No. 6,741,957, U.S. Pat. No. 6,304,489 and U.S. Pat. No. 6,849,992 for general techniques for introducing transgenes into mammals), in plants or parts of plants including but not limited to their leaves, flowers, fruits, seed, roots or turbers (for example in tobacco, maize, soybean or alfalfa) or in for example pupae of the silkworm Bombix mori.

[0970] Furthermore, the amino acid sequences, Nanobodies and polypeptides of the invention can also be expressed and/or produced in cell-free expression systems, and suitable examples of such systems will be clear to the skilled person. Some preferred, but non-limiting examples include expression in the wheat germ system; in rabbit reticulocyte lysates; or in the E. coli Zubay system.

[0971] As mentioned above, one of the advantages of the use of Nanobodies is that the polypeptides based thereon can be prepared through expression in a suitable bacterial system, and suitable bacterial expression systems, vectors, host cells, regulatory elements, etc., will be clear to the skilled person, for example from the references cited above. It should however be noted that the invention in its broadest sense is not limited to expression in bacterial systems.

[0972] Preferably, in the invention, an (in vivo or in vitro) expression system, such as a bacterial expression system, is used that provides the polypeptides of the invention in a form that is suitable for pharmaceutical use, and such expression systems will again be clear to the skilled person. As also will be clear to the skilled person, polypeptides of the invention suitable for pharmaceutical use can be prepared using techniques for peptide synthesis.

[0973] For production on industrial scale, preferred heterologous hosts for the (industrial) production of Nanobodies or Nanobody-containing protein therapeutics include strains of E. coli, Pichia pastoris, S. cerevisiae that are suitable for large scale expression/production/fermentation, and in particular for large scale pharmaceutical (i.e. GMP grade) expression/production/fermentation. Suitable examples of such strains will be clear to the skilled person. Such strains and production/expression systems are also made available by companies such as Biovitrum (Uppsala, Sweden).

[0974] Alternatively, mammalian, cell lines, in particular Chinese hamster ovary (CHO) cells, can be used for large scale expression/production/fermentation, and in particular for large scale pharmaceutical expression/production/fermentation. Again, such expression/production systems are also made available by some of the companies mentioned above.

[0975] The choice of the specific expression system would depend in part on the requirement for certain post-translational modifications, more specifically glycosylation. The production of a Nanobody-containing recombinant protein for which glycosylation is desired or required would necessitate the use of mammalian expression hosts that have the ability to glycosylate the expressed protein. In this respect, it will be clear to the skilled person that the glycosylation pattern obtained (i.e. the kind, number and position of residues attached) will depend on the cell or cell line that is used for the expression. Preferably, either a human cell or cell line is used (i.e. leading to a protein that essentially has a human glycosylation pattern) or another mammalian cell line is used that can provide a glycosylation pattern that is essentially and/or functionally the same as human glycosylation or at least mimics human glycosylation. Generally, prokaryotic hosts such as E. coli do not have the ability to glycosylate proteins, and the use of lower eukaryotes such as yeast usually leads to a glycosylation pattern that differs from human glycosylation. Nevertheless, it should be understood that all the foregoing host cells and expression systems can be used in the invention, depending on the desired amino acid sequence, Nanobody or polypeptide to be obtained.

[0976] Thus, according to one non-limiting aspect of the invention, the amino acid sequence, Nanobody or polypeptide of the invention is glycosylated. According to another non-limiting aspect of the invention, the amino acid sequence, Nanobody or polypeptide of the invention is non-glycosylated.

[0977] According to one preferred, but non-limiting aspect of the invention, the amino acid sequence, Nanobody or polypeptide of the invention is produced in a bacterial cell, in particular a bacterial cell suitable for large scale pharmaceutical production, such as cells of the strains mentioned above.

[0978] According to another preferred, but non-limiting aspect of the invention, the amino acid sequence, Nanobody or polypeptide of the invention is produced in a yeast cell, in particular a yeast cell suitable for large scale pharmaceutical production, such as cells of the species mentioned above.

[0979] According to yet another preferred, but non-limiting aspect of the invention, the amino acid sequence, Nanobody or polypeptide of the invention is produced in a mammalian cell, in particular in a human cell or in a cell of a human cell line, and more in particular in a human cell or in a cell of a human cell line that is suitable for large scale pharmaceutical production, such as the cell lines mentioned hereinabove.

[0980] When expression in a host cell is used to produce the amino acid sequences, Nanobodies and the polypeptides of the invention, the amino acid sequences, Nanobodies and polypeptides of the invention can be produced either intracellularly (e.g. in the cytosol, in the periplasma or in inclusion bodies) and then isolated from the host cells and optionally further purified; or can be produced extracellularly (e.g. in the medium in which the host cells are cultured) and then isolated from the culture medium and optionally further purified. When eukaryotic host cells are used, extracellular production is usually preferred since this considerably facilitates the further isolation and downstream processing of the Nanobodies and proteins obtained. Bacterial cells such as the strains of E. coli mentioned above normally do not secrete proteins extracellularly, except for a few classes of proteins such as toxins and hemolysin, and secretory production in E. coli refers to the translocation of proteins across the inner membrane to the periplasmic space. Periplasmic production provides several advantages over cytosolic production. For example, the N-terminal amino acid sequence of the secreted product can be identical to the natural gene product after cleavage of the secretion signal sequence by a specific signal peptidase. Also, there appears to be much less protease activity in the periplasm than in the cytoplasm. In addition, protein purification is simpler due to fewer contaminating proteins in the periplasm. Another advantage is that correct disulfide bonds may form because the periplasm provides a more oxidative environment than the cytoplasm. Proteins overexpressed in E. coli are often found in insoluble aggregates, so-called inclusion bodies. These inclusion bodies may be located in the cytosol or in the periplasm; the recovery of biologically active proteins from these inclusion bodies requires a denaturation/refolding process. Many recombinant proteins, including therapeutic proteins, are recovered from inclusion bodies. Alternatively, as will be clear to the skilled person, recombinant strains of bacteria that have been genetically modified so as to secrete a desired protein, and in particular an amino acid sequence, Nanobody or a polypeptide of the invention, can be used.

[0981] Thus, according to one non-limiting aspect of the invention, the amino acid sequence, Nanobody or polypeptide of the invention is an amino acid sequence, Nanobody or polypeptide that has been produced intracellularly and that has been isolated from the host cell, and in particular from a bacterial cell or from an inclusion body in a bacterial cell. According to another non-limiting aspect of the invention, the amino acid sequence, Nanobody or polypeptide of the invention is an amino acid sequence, Nanobody or polypeptide that has been produced extracellularly, and that has been isolated from the medium in which the host cell is cultivated.

[0982] Some preferred, but non-limiting promoters for use with these host cells include,
[0983] for expression in E. coli: lac promoter (and derivatives thereof such as the lacUV5 promoter); arabinose promoter; left-(PL) and rightward (PR) promoter of phage lambda; promoter of the trp operon; hybrid lac/trp promoters (tac and trc); T7-promoter (more specifically that of T7-phage gene 10) and other T-phage promoters; promoter of the Tn10 tetracycline resistance gene; engineered variants of the above promoters that include one or more copies of an extraneous regulatory operator sequence; for expression in S. cerevisiae: constitutive: ADH1 (alcohol dehydrogenase 1), ENO (enolase), CYC1 (cytochrome c iso-1), GAPDH (glyceraldehydes-3-phosphate dehydrogenase), PGK1 (phosphoglycerate kinase), PYK1 (pyruvate kinase); regulated: GAL1,10,7 (galactose metabolic enzymes), ADH2 (alcohol dehydrogenase 2), PHO5 (acid phosphatase), CUP 1 (copper metallothionein); heterologous: CaMV (cauliflower mosaic virus ³⁵S promoter);
[0984] for expression in Pichia pastoris: the AOX1 promoter (alcohol oxidase I);
[0985] for expression in mammalian cells: human cytomegalovirus (hCMV) immediate early enhancer/promoter; human cytomegalovirus (hCMV) immediate early promoter variant that contains two tetracycline operator sequences such that the promoter can be regulated by the Tet repressor; Herpes Simplex Virus thymidine kinase (TK) promoter; Rous Sarcoma Virus long terminal repeat (RSV LTR) enhancer/promoter; elongation factor 1α (hEF-1α) promoter from human, chimpanzee, mouse or rat; the SV40 early promoter; HIV-1 long terminal repeat promoter; β-actin promoter;

[0986] Some preferred, but non-limiting vectors for use with these host cells include:
[0987] vectors for expression in mammalian cells: pMAMneo (Clontech), pcDNA3 (Invitrogen), pMC1neo (Stratagene), pSGS (Stratagene), EBO-pSV2-neo (ATCC 37593), pBPV-1 (8-2) (ATCC 37110), pdBPV-MMTneo (342-12) (ATCC 37224), pRSVgpt (ATCC37199), pRSVneo (ATCC37198), pSV2-dhfr (ATCC 37146), pUCTag (ATCC 37460) and 1ZD35 (ATCC 37565), as well as viral-based expression systems, such as those based on adenovirus;
[0988] vectors for expression in bacterial cells: pET vectors (Novagen) and pQE vectors (Qiagen);
[0989] vectors for expression in yeast or other fungal cells: pYES2 (Invitrogen) and Pichia expression vectors (Invitrogen);
[0990] vectors for expression in insect cells: pBlueBacII (Invitrogen) and other baculovirus vectors
[0991] vectors for expression in plants or plant cells: for example vectors based on cauliflower mosaic virus or tobacco mosaic virus, suitable strains of Agrobacterium, or Ti-plasmid based vectors.

[0992] Some preferred, but non-limiting secretory sequences for use with these host cells include:
[0993] for use in bacterial cells such as E. coli: PelB, Bla, OmpA, OmpC, OmpF, OmpT, StII, PhoA, PhoE, MalE, Lpp, LamB, and the like; TAT signal peptide, hemolysin C-terminal secretion signal;
[0994] for use in yeast: α-mating factor prepro-sequence, phosphatase (pho1), invertase (Suc), etc.;
[0995] for use in mammalian cells: indigenous signal in case the target protein is of eukaryotic origin; murine Ig κ-chain V-J2-C signal peptide; etc.

[0996] Suitable techniques for transforming a host or host cell of the invention will be clear to the skilled person and may depend on the intended host cell/host organism and the genetic construct to be used. Reference is again made to the handbooks and patent applications mentioned above.

[0997] After transformation, a step for detecting and selecting those host cells or host organisms that have been successfully transformed with the nucleotide sequence/genetic construct of the invention may be performed. This may for instance be a selection step based on a selectable marker present in the genetic construct of the invention or a step involving the detection of the amino acid sequence of the invention, e.g. using specific antibodies.

[0998] The transformed host cell (which may be in the form or a stable cell line) or host organisms (which may be in the form of a stable mutant line or strain) form further aspects of the present invention.

[0999] Preferably, these host cells or host organisms are such that they express, or are (at least) capable of expressing (e.g. under suitable conditions), an amino acid sequence, Nanobody or polypeptide of the invention (and in case of a host organism: in at least one cell, part, tissue or organ thereof). The invention also includes further generations, progeny and/or offspring of the host cell or host organism of the invention, that may for instance be obtained by cell division or by sexual or asexual reproduction.

[1000] To produce/obtain expression of the amino acid sequences of the invention, the transformed host cell or transformed host organism may generally be kept, maintained and/or cultured under conditions such that the (desired) amino acid sequence, Nanobody or polypeptide of the invention is expressed/produced. Suitable conditions will be clear to the skilled person and will usually depend upon the host cell/host organism used, as well as on the regulatory elements that control the expression of the (relevant) nucleotide sequence of the invention. Again, reference is made to the handbooks and patent applications mentioned above in the paragraphs on the genetic constructs of the invention.

[1001] Generally, suitable conditions may include the use of a suitable medium, the presence of a suitable source of food and/or suitable nutrients, the use of a suitable temperature, and optionally the presence of a suitable inducing factor or compound (e.g. when the nucleotide sequences of the invention are under the control of an inducible promoter); all of which may be selected by the skilled person. Again, under such conditions, the amino acid sequences of the invention may be expressed in a constitutive manner, in a transient manner, or only when suitably induced.

[1002] It will also be clear to the skilled person that the amino acid sequence, Nanobody or polypeptide of the invention may (first) be generated in an immature form (as mentioned above), which may then be subjected to post-translational modification, depending on the host cell/host organism used. Also, the amino acid sequence, Nanobody or polypeptide of the invention may be glycosylated, again depending on the host cell/host organism used.

[1003] The amino acid sequence, Nanobody or polypeptide of the invention may then be isolated from the host cell/host organism and/or from the medium in which said host cell or host organism was cultivated, using protein isolation and/or purification techniques known per se, such as (preparative) chromatography and/or electrophoresis techniques, differential precipitation techniques, affinity techniques (e.g. using a specific, cleavable amino acid sequence fused with the amino acid sequence, Nanobody or polypeptide of the invention) and/or preparative immunological techniques (i.e. using antibodies against the amino acid sequence to be isolated).

[1004] Generally, for pharmaceutical use, the polypeptides of the invention may be formulated as a pharmaceutical preparation or compositions comprising at least one polypeptide of the invention and at least one pharmaceutically acceptable carrier, diluent or excipient and/or adjuvant, and optionally one or more further pharmaceutically active polypeptides and/or compounds. By means of non-limiting examples, such a formulation may be in a form suitable for oral administration, for parenteral administration (such as by intravenous, intramuscular or subcutaneous injection or intravenous infusion), for topical administration, for administration by inhalation, by a skin patch, by an implant, by a suppository, etc. Such suitable administration forms—which may be solid, semi-solid or liquid, depending on the manner of administration—as well as methods and carriers for use in the preparation thereof, will be clear to the skilled person, and are further described herein.

[1005] Thus, in a further aspect, the invention relates to a pharmaceutical composition that contains at least one amino acid of the invention, at least one Nanobody of the invention or at least one polypeptide of the invention and at least one suitable carrier, diluent or excipient (i.e. suitable for pharmaceutical use), and optionally one or more further active substances.

[1006] Generally, the amino acid sequences, Nanobodies and polypeptides of the invention can be formulated and administered in any suitable manner known per se, for which reference is for example made to the general background art cited above (and in particular to WO 04/041862, WO 04/041863, WO 04/041865, WO 04/041867 and WO 08/020,079) as well as to the standard handbooks, such as Remington's Pharmaceutical Sciences, 18^{th} Ed., Mack Publishing Company, USA (1990), Remington, the Science and Practice of Pharmacy, 21th Edition, Lippincott Williams and Wilkins (2005); or the Handbook of Therapeutic Antibodies (S. Dubel, Ed.), Wiley, Weinheim, 2007 (see for example pages 252-255).

[1007] For example, the amino acid sequences, Nanobodies and polypeptides of the invention may be formulated and administered in any manner known per se for conventional antibodies and antibody fragments (including ScFv's and diabodies) and other pharmaceutically active proteins. Such formulations and methods for preparing the same will be clear to the skilled person, and for example include preparations suitable for parenteral administration (for example intravenous, intraperitoneal, subcutaneous, intramuscular, intraluminal, intra-arterial or intrathecal administration) or for topical (i.e. transdermal or intradermal) administration.

[1008] Preparations for parenteral administration may for example be sterile solutions, suspensions, dispersions or emulsions that are suitable for infusion or injection. Suitable carriers or diluents for such preparations for example include, without limitation, sterile water and aqueous buffers and solutions such as physiological phosphate-buffered saline, Ringer's solutions, dextrose solution, and Hank's solution; water oils; glycerol; ethanol; glycols such as propylene glycol or as well as mineral oils, animal oils and vegetable oils, for example peanut oil, soybean oil, as well as suitable mixtures thereof. Usually, aqueous solutions or suspensions will be preferred.

[1009] The amino acid sequences, Nanobodies and polypeptides of the invention can also be administered using gene therapy methods of delivery. See, e.g., U.S. Pat. No. 5,399,346, which is incorporated by reference in its entirety. Using a gene therapy method of delivery, primary cells transfected with the gene encoding an amino acid sequence, Nanobody or polypeptide of the invention can additionally be transfected with tissue specific promoters to target specific organs, tissue, grafts, tumors, or cells and can additionally be transfected with signal and stabilization sequences for subcellularly localized expression.

[1010] Thus, the amino acid sequences, Nanobodies and polypeptides of the invention may be systemically administered, e.g., orally, in combination with a pharmaceutically acceptable vehicle such as an inert diluent or an assimilable edible carrier. They may be enclosed in hard or soft shell gelatin capsules, may be compressed into tablets, or may be incorporated directly with the food of the patient's diet. For oral therapeutic administration, the amino acid sequences. Nanobodies and polypeptides of the invention may be combined with one or more excipients and used in the form of ingestible tablets, buccal tablets, troches, capsules, elixirs, suspensions, syrups, wafers, and the like. Such compositions and preparations should contain at least 0.1% of the amino acid sequence, Nanobody or polypeptide of the invention. Their percentage in the compositions and preparations may, of course, be varied and may conveniently be between about 2 to about 60% of the weight of a given unit dosage form. The amount of the amino acid sequence, Nanobody or polypeptide of the invention in such therapeutically useful compositions is such that an effective dosage level will be obtained.

[1011] The tablets, troches, pills, capsules, and the like may also contain the following: binders such as gum tragacanth, acacia, corn starch or gelatin; excipients such as dicalcium phosphate; a disintegrating agent such as corn starch, potato starch, alginic acid and the like; a lubricant such as magnesium stearate; and a sweetening agent such as sucrose, fructose, lactose or aspartame or a flavoring agent such as peppermint, oil of wintergreen, or cherry flavoring may be added. When the unit dosage form is a capsule, it may contain, in addition to materials of the above type, a liquid carrier, such as a vegetable oil or a polyethylene glycol. Various other materials may be present as coatings or to otherwise modify the physical form of the solid unit dosage form. For instance, tablets, pills, or capsules may be coated with gelatin, wax, shellac or sugar and the like. A syrup or elixir may contain the amino acid sequences, Nanobodies and polypeptides of the invention, sucrose or fructose as a sweetening agent, methyl and propylparabens as preservatives, a dye and flavoring such as cherry or orange flavor. Of course, any material used in preparing any unit dosage form should be pharmaceutically acceptable and substantially non-toxic in the amounts employed. In addition, the amino acid sequences, Nanobodies and polypeptides of the invention may be incorporated into sustained-release preparations and devices.

[1012] Preparations and formulations for oral administration may also be provided with an enteric coating that will allow the constructs of the invention to resist the gastric environment and pass into the intestines. More generally, preparations and formulations for oral administration may be suitably formulated for delivery into any desired part of the gastrointestinal tract. In addition, suitable suppositories may be used for delivery into the gastrointestinal tract.

[1013] The amino acid sequences, Nanobodies and polypeptides of the invention may also be administered intravenously or intraperitoneally by infusion or injection. Solutions of the amino acid sequences, Nanobodies and polypeptides of the invention or their salts can be prepared in water, optionally mixed with a nontoxic surfactant. Dispersions can also be prepared in glycerol, liquid polyethylene glycols, triacetin, and mixtures thereof and in oils. Under ordinary conditions of storage and use, these preparations contain a preservative to prevent the growth of microorganisms.

[1014] The pharmaceutical dosage forms suitable for injection or infusion can include sterile aqueous solutions or dispersions or sterile powders comprising the active ingredient which are adapted for the extemporaneous preparation of sterile injectable or infusible solutions or dispersions, optionally encapsulated in liposomes. In all eases, the ultimate dosage form must be sterile, fluid and stable under the conditions of manufacture and storage. The liquid carrier or vehicle can be a solvent or liquid dispersion medium comprising, for example, water, ethanol, a polyol (for example, glycerol, propylene glycol, liquid polyethylene glycols, and the like), vegetable oils, nontoxic glyceryl esters, and suitable mixtures thereof. The proper fluidity can be maintained, for example, by the formation of liposomes, by the maintenance of the required particle size in the case of dispersions or by the use of surfactants. The prevention of the action of microorganisms can be brought about by various antibacterial and antifungal agents, for example, parabens, chlorobutanol, phenol, sorbic acid, thimerosal, and the like. In many cases, it will be preferable to include isotonic agents, for example, sugars, buffers or sodium chloride. Prolonged absorption of the injectable compositions can be brought about by the use in the compositions of agents delaying absorption, for example, aluminum monostearate and gelatin.

[1015] Sterile injectable solutions are prepared by incorporating the amino acid sequences, Nanobodies and polypeptides of the invention in the required amount in the appropriate solvent with various of the other ingredients enumerated above, as required, followed by filter sterilization. In the case of sterile powders for the preparation of sterile injectable solutions, the preferred methods of preparation are vacuum drying and the freeze drying techniques, which yield a powder of the active ingredient plus any additional desired ingredient present in the previously sterile-filtered solutions.

[1016] For topical administration, the amino acid sequences, Nanobodies and polypeptides of the invention may be applied in pure form, i.e., when they are liquids. However, it will generally be desirable to administer them to the skin as compositions or formulations, in combination with a dermatologically acceptable carrier, which may be a solid or a liquid.

[1017] Useful solid carriers include finely divided solids such as talc, clay, microcrystalline cellulose, silica, alumina and the like. Useful liquid carriers include water, hydroxyalkyls or glycols or water-alcohol/glycol blends, in which the amino acid sequences, Nanobodies and polypeptides of the invention can be dissolved or dispersed at effective levels, optionally with the aid of non-toxic surfactants. Adjuvants such as fragrances and additional antimicrobial agents can be added to optimize the properties for a given use. The resultant liquid compositions can be applied from absorbent pads, used to impregnate bandages and other dressings, or sprayed onto the affected area using pump-type or aerosol sprayers.

[1018] Thickeners such as synthetic polymers, fatty acids, fatty acid salts and esters, fatty alcohols, modified celluloses or modified mineral materials can also be employed with liquid carriers to form spreadable pastes, gels, ointments, soaps, and the like, for application directly to the skin of the user.

[1019] Examples of useful dermatological compositions which can be used to deliver the amino acid sequences, Nanobodies and polypeptides of the invention to the skin are known to the art; for example, see Jacquet et al. (U.S. Pat. No. 4,608,392), Geria (U.S. Pat. No. 4,992,478), Smith et al. (U.S. Pat. No. 4,559,157) and Wortzman (U.S. Pat. No. 4,820,508).

[1020] Useful dosages of the amino acid sequences, Nanobodies and polypeptides of the invention can be determined by comparing their in vitro activity, and in vivo activity in animal models. Methods for the extrapolation of effective dosages in mice, and other animals, to humans are known to the art; for example, see U.S. Pat. No. 4,938,949.

[1021] Generally, the concentration of the amino acid sequences, Nanobodies and polypeptides of the invention in a liquid composition, such as a lotion, will be from about 0.1-25 wt-%, preferably from about 0.5-10 wt-%. The concentration in a semi-solid or solid composition such as a gel or a powder will be about 0.1-5 wt-%, preferably about 0.5-2.5 wt-%.

[1022] The amount of the amino acid sequences, Nanobodies and polypeptides of the invention required for use in treatment will vary not only with the particular amino acid sequence, Nanobody or polypeptide selected but also with the route of administration, the nature of the condition being treated and the age and condition of the patient and will be ultimately at the discretion of the attendant physician or clinician. Also the dosage of the amino acid sequences, Nanobodies and polypeptides of the invention varies depending on the target cell, tumor, tissue, graft, or organ.

[1023] The desired dose may conveniently be presented in a single dose or as divided doses administered at appropriate intervals, for example, as two, three, four or more sub-doses per day. The sub-dose itself may be further divided, e.g., into a number of discrete loosely spaced administrations; such as multiple inhalations from an insufflator or by application of a plurality of drops into the eye.

[1024] An administration regimen could include long-term, daily treatment. By “long-term” is meant at least two weeks and preferably, several weeks, months, or years of duration. Necessary modifications in this dosage range may be determined by one of ordinary skill in the art using only routine experimentation given the teachings herein. See Remington's Pharmaceutical Sciences (Martin, E. W., ed. 4). Mack Publishing Co., Easton, Pa. The dosage can also be adjusted by the individual physician in the event of any complication.

[1025] In another aspect, the invention relates to a method for the prevention and/or treatment of at least one cancer and/or tumor, said method comprising administering, to a subject in need thereof, a pharmaceutically active amount of an amino acid sequence of the invention, of a Nanobody of the invention, of a polypeptide of the invention, and/or of a pharmaceutical composition comprising the same.

[1026] In the context of the present invention, the term “prevention and/or treatment” not only comprises preventing and/or treating the disease, but also generally comprises preventing the onset of the disease, slowing or reversing the progress of disease, preventing or slowing the onset of one or more symptoms associated with the disease, reducing and/or alleviating one or more symptoms associated with the disease, reducing the severity and/or the duration of the disease and/or of any symptoms associated therewith and/or preventing a further increase in the severity of the disease and/or of any symptoms associated therewith, preventing, reducing or reversing any physiological damage caused by the disease, and generally any pharmacological action that is beneficial to the patient being treated.

[1027] The subject to be treated may be any warm-blooded animal, but is in particular a mammal, and more in particular a human being. As will be clear to the skilled person, the subject to be treated will in particular be a person suffering from, or at risk of, the diseases and disorders mentioned herein.

[1028] The invention relates to a method for the prevention and/or treatment of at least one disease or disorder that is associated with HER2, with its biological or pharmacological activity, and/or with the biological pathways or signalling in which HER2 is involved, said method comprising administering, to a subject in need thereof, a pharmaceutically active amount of an amino acid sequence of the invention, of a Nanobody of the invention, of a polypeptide of the invention, and/or of a pharmaceutical composition comprising the same. In particular, the invention relates to a method for the prevention and/or treatment of at least one disease or disorder that can be treated by modulating HER2, its biological or pharmacological activity, and/or the biological pathways or signalling in which HER2 is involved, said method comprising administering, to a subject in need thereof, a pharmaceutically active amount of an amino acid sequence of the invention, of a Nanobody of the invention, of a polypeptide of the invention, and/or of a pharmaceutical composition comprising the same. In particular, said pharmaceutically effective amount may be an amount that is sufficient to modulate HER2, its biological or pharmacological activity, and/or the biological pathways or signalling in which HER2 is involved; and/or an amount that provides a level of the amino acid sequence of the invention, of a Nanobody of the invention, of a polypeptide of the invention in the circulation that is sufficient to modulate HER2, its biological or pharmacological activity, and/or the biological pathways or signalling in which HER2 is involved.

[1029] The invention furthermore relates to a method for the prevention and/or treatment of at least one disease or disorder that can be prevented and/or treated by administering an amino acid sequence of the invention, a Nanobody of the invention or a polypeptide of the invention to a patient, said method comprising administering, to a subject in need thereof, a pharmaceutically active amount of an amino acid sequence of the invention, of a Nanobody of the invention, of a polypeptide of the invention, and/or of a pharmaceutical composition comprising the same.

[1030] More in particular, the invention relates to a method for the prevention and/or treatment of at least one disease or disorder chosen from the group consisting of the diseases and disorders listed herein, said method comprising administering, to a subject in need thereof, a pharmaceutically active amount of an amino acid sequence of the invention, of a Nanobody of the invention, of a polypeptide of the invention, and/or of a pharmaceutical composition comprising the same.

[1031] In another aspect, the invention relates to a method for immunotherapy, and in particular for passive immunotherapy, which method comprises administering, to a subject suffering from or at risk of the diseases and disorders mentioned herein, a pharmaceutically active amount of an amino acid sequence of the invention, of a Nanobody of the invention, of a polypeptide of the invention, and/or of a pharmaceutical composition comprising the same.

[1032] In the above methods, the amino acid sequences, Nanobodies and/or polypeptides of the invention and/or the compositions comprising the same can be administered in any suitable manner, depending on the specific pharmaceutical formulation or composition to be used. Thus, the amino acid sequences, Nanobodies and/or polypeptides of the invention and/or the compositions comprising the same can for example be administered orally, intraperitoneally (e.g. intravenously, subcutaneously, intramuscularly, or via any other route of administration that circumvents the gastrointestinal tract), intranasally, transdermally, topically, by means of a suppository, by inhalation, again depending on the specific pharmaceutical formulation or composition to be used. The clinician will be able to select a suitable route of administration and a suitable pharmaceutical formulation or composition to be used in such administration, depending on the disease or disorder to be prevented or treated and other factors well known to the clinician.

[1033] The amino acid sequences, Nanobodies and/or polypeptides of the invention and/or the compositions comprising the same are administered according to a regime of treatment that is suitable for preventing and/or treating the disease or disorder to be prevented or treated. The clinician will generally be able to determine a suitable treatment regimen, depending on factors such as the disease or disorder to be prevented or treated, the severity of the disease to be treated and/or the severity of the symptoms thereof, the specific amino acid sequence, Nanobody or polypeptide of the invention to be used, the specific route of administration and pharmaceutical formulation or composition to be used, the age, gender, weight, diet, general condition of the patient, and similar factors well known to the clinician.

[1034] Generally, the treatment regimen will comprise the administration of one or more amino acid sequences, Nanobodies and/or polypeptides of the invention, or of one or more compositions comprising the same, in one or more pharmaceutically effective amounts or doses. The specific amount(s) or doses to administered can be determined by the clinician, again based on the factors cited above.

[1035] Generally, for the prevention and/or treatment of the diseases and disorders mentioned herein and depending on the specific disease or disorder to be treated, the potency of the specific amino acid sequence, Nanobody and polypeptide of the invention to be used, the specific route of administration and the specific pharmaceutical formulation or composition used, the amino acid sequences, Nanobodies and polypeptides of the invention will generally be administered in an amount between 1 grain and 0.01 microgram per kg body weight per day, preferably between 0.1 gram and 0.1 microgram per kg body weight per day, such as about 1, 10, 100 or 1000 microgram per kg body weight per day, either continuously (e.g. by infusion), as a single daily dose or as multiple divided doses during the day. The clinician will generally be able to determine a suitable daily dose, depending on the factors mentioned herein. It will also be clear that in specific cases, the clinician may choose to deviate from these amounts, for example on the basis of the factors cited above and his expert judgment. Generally, some guidance on the amounts to be administered can be obtained from the amounts usually administered for comparable conventional antibodies or antibody fragments against the same target administered via essentially the same route, taking into account however differences in affinity/avidity, efficacy, biodistribution, half-life and similar factors well known to the skilled person.

[1036] Usually, in the above method, a single amino acid sequence, Nanobody or polypeptide of the invention will be used. It is however within the scope of the invention to use two or more amino acid sequences. Nanobodies and/or polypeptides of the invention in combination.

[1037] The Nanobodies, amino acid sequences and polypeptides of the invention may also be used in combination with one or more further pharmaceutically active compounds or principles, i.e. as a combined treatment regimen, which may or may not lead to a synergistic effect. Again, the clinician will be able to select such further compounds or principles, as well as a suitable combined treatment regimen, based on the factors cited above and his expert judgement.

[1038] In particular, the amino acid sequences, Nanobodies and polypeptides of the invention may be used in combination with other pharmaceutically active compounds or principles that are or can be used for the prevention and/or treatment of the diseases and disorders cited herein, as a result of which a synergistic effect may or may not be obtained. Examples of such compounds and principles, as well as routes, methods and pharmaceutical formulations or compositions for administering them will be clear to the clinician.

[1039] When two or more substances or principles are to be used as part of a combined treatment regimen, they can be administered via the same route of administration or via different routes of administration, at essentially the same time or at different times (e.g. essentially simultaneously, consecutively, or according to an alternating regime). When the substances or principles are to be administered simultaneously via the same route of administration, they may be administered as different pharmaceutical formulations or compositions or part of a combined pharmaceutical formulation or composition, as will be clear to the skilled person.

[1040] Also, when two or more active substances or principles are to be used as part of a combined treatment regimen, each of the substances or principles may be administered in the same amount and according to the same regimen as used when the compound or principle is used on its own, and such combined use may or may not lead to a synergistic effect. However, when the combined use of the two or more active substances or principles leads to a synergistic effect, it may also be possible to reduce the amount of one, more or all of the substances or principles to be administered, while still achieving the desired therapeutic action. This may for example be useful for avoiding, limiting or reducing any unwanted side-effects that are associated with the use of one or more of the substances or principles when they are used in their usual amounts, while still obtaining the desired pharmaceutical or therapeutic effect.

[1041] The effectiveness of the treatment regimen used according to the invention may be determined and/or followed in any manner known per se for the disease or disorder involved, as will be clear to the clinician. The clinician will also be able, where appropriate and on a case-by-case basis, to change or modify a particular treatment regimen, so as to achieve the desired therapeutic effect, to avoid, limit or reduce unwanted side-effects, and/or to achieve an appropriate balance between achieving the desired therapeutic effect on the one hand and avoiding, limiting or reducing undesired side effects on the other hand.

[1042] Generally, the treatment regimen will be followed until the desired therapeutic effect is achieved and/or for as long as the desired therapeutic effect is to be maintained. Again, this can be determined by the clinician.

[1043] In another aspect, the invention relates to the use of an amino acid sequence, Nanobody or polypeptide of the invention in the preparation of a pharmaceutical composition for prevention and/or treatment of at least one cancer and/or tumor; and/or for use in one or more of the methods of treatment mentioned herein.

[1044] In another aspect, the invention relates to an amino acid sequence, Nanobody or polypeptide of the invention for prevention and/or treatment of at least one cancer and/or tumor; and/or for use in one or more of the methods of treatment mentioned herein.

[1045] The subject to be treated may be any warm-blooded animal, but is in particular a mammal, and more in particular a human being. As will be clear to the skilled person, the subject to be treated will in particular be a person suffering from, or at risk of, the diseases and disorders mentioned herein.

[1046] The invention also relates to the use of an amino acid sequence, Nanobody or polypeptide of the invention in the preparation of a pharmaceutical composition for the prevention and/or treatment of at least one disease or disorder that can be prevented and/or treated by administering an amino acid sequence, Nanobody or polypeptide of the invention to a patient.

[1047] More in particular, the invention relates to the use of an amino acid sequence, Nanobody or polypeptide of the invention in the preparation of a pharmaceutical composition for the prevention and/or treatment of cancers and/or tumors, and in particular for the prevention and treatment of one or more of the diseases and disorders listed herein.

[1048] Again, in such a pharmaceutical composition, the one or more amino acid sequences, Nanobodies or polypeptides of the invention may also be suitably combined with one or more other active principles, such as those mentioned herein.

[1049] Finally, although the use of the Nanobodies of the invention (as defined herein) and of the polypeptides of the invention is much preferred, it will be clear that on the basis of the description herein, the skilled person will also be able to design and/or generate, in an analogous manner, other amino acid sequences and in particular (single) domain antibodies against HER2, as well as polypeptides comprising such (single) domain antibodies.

[1050] For example, it will also be clear to the skilled person that it may be possible to “graft” one or more of the CDR's mentioned above for the Nanobodies of the invention onto such (single) domain antibodies or other protein scaffolds, including but not limited to human scaffolds or non-immunoglobulin scaffolds. Suitable scaffolds and techniques for such CDR grafting will be clear to the skilled person and are well known in the art, see for example U.S. Pat. No. 7,180,370, WO 01/27160, EP 0 605 522, EP 0 460 167, U.S. Pat. No. 7,054,297, Nicaise et al., Protein Science (2004), 13:1882-1891; Ewert et al., Methods, 2004 October; 34(2):184-199; Kettleborough et al., Protein Eng. 1991 October; 4(7): 773-783; O'Brien and Jones, Methods Mol. Biol. 2003:207:81-100; Skerra, J. Mol. Recognit. 2000:13:167-187, and Saerens et al., J. Mol. Biol. 2005 Sep. 23; 352(3):597-607, and the further references cited therein. For example, techniques known per se for grafting mouse or rat CDR's onto human frameworks and scaffolds can be used in an analogous manner to provide chimeric proteins comprising one or more of the CDR's of the Nanobodies of the invention and one or more human framework regions or sequences.

[1051] It should also be noted that, when the Nanobodies of the inventions contain one or more other CDR sequences than the preferred CDR sequences mentioned above, these CDR sequences can be obtained in any manner known per se, for example from Nanobodies (preferred), V_{H} domains from conventional antibodies (and in particular from human antibodies), heavy chain antibodies, conventional 4-chain antibodies (such as conventional human 4-chain antibodies) or other immunoglobulin sequences directed against HER2. Such immunoglobulin sequences directed against HER2 can be generated in any manner known per se, as will be clear to the skilled person, i.e. by immunization with HER2 or by screening a suitable library of immunoglobulin sequences with HER2, or any suitable combination thereof. Optionally, this may be followed by techniques such as random or site-directed mutagenesis and/or other techniques for affinity maturation known per se. Suitable techniques for generating such immunoglobulin sequences will be clear to the skilled person, and for example include the screening techniques reviewed by Hoogenboom, Nature Biotechnology, 23, 9, 1105-1116 (2005) Other techniques for generating immunoglobulins against a specified target include for example the Nanoclone technology (as for example described in the published US patent application 2006-0211088), so-called SLAM technology (as for example described in the European patent application 0 542 810), the use of transgenic mice expressing human immunoglobulins or the well-known hybridoma techniques (see for example Larrick et al, Biotechnology, Vol. 7, 1989, p. 934). All these techniques can be used to generate immunoglobulins against HER2, and the CDR's of such immunoglobulins can be used in the Nanobodies of the invention, i.e. as outlined above. For example, the sequence of such a CDR can be determined, synthesized and/or isolated, and inserted into the sequence of a Nanobody of the invention (e.g. so as to replace the corresponding native CDR), all using techniques known per se such as those described herein, or Nanobodies of the invention containing such CDR's (or nucleic acids encoding the same) can be synthesized de novo, again using the techniques mentioned herein.

[1052] Further uses of the amino acid sequences, Nanobodies, polypeptides, nucleic acids, genetic constructs and hosts and host cells of the invention will be clear to the skilled person based on the disclosure herein. For example, and without limitation, the amino acid sequences of the invention can be linked to a suitable carrier or solid support so as to provide a medium than can be used in a manner known per se to purify HER2 from compositions and preparations comprising the same. Derivatives of the amino acid sequences of the invention that comprise a suitable detectable label can also be used as markers to determine (qualitatively or quantitatively) the presence of HER2 in a composition or preparation or as a marker to selectively detect the presence of HER2 on the surface of a cell or tissue (for example, in combination with suitable cell sorting techniques).

[1053] The invention will now be further described by means of the following non-limiting preferred aspects, examples and figures:

### Preferred Aspects

[1054] 1. Amino acid sequence that is directed against and/or that can specifically bind to HER2.
[1055] 2. Amino acid sequence according to aspect 1, wherein said amino acid sequence competes with Herceptin® for binding to HER2.
[1056] 3. Amino acid sequence according to any of aspects 1 or 2, wherein said amino acid sequence inhibits and/or blocks binding of Herceptin® to HER
[1057] 4. Amino acid sequence according to any of aspects 1 to 3, wherein said amino acid sequence is directed against the Herceptin® binding site on HER2.
[1058] 5. Amino acid sequence according to any of aspects 1 to 4, wherein said amino acid sequence specifically binds to domain IV of HER2.
[1059] 6. Amino acid sequence according to aspect 1, wherein said amino acid sequence competes with Omnitarg for binding to HER2.
[1060] 7. Amino acid sequence according to any of aspect 1 or 7, wherein said amino acid sequence inhibits and/or blocks binding of Omnitarg to HER2.
[1061] 8. Amino acid sequence according to any of aspects 6 or 7, wherein said amino acid sequence is directed against the Omnitarg binding site on HER2.
[1062] 9. Amino acid sequence according to any of aspects 6 to 8, wherein said amino acid sequence specifically binds to domain II of HER2.
[1063] 10. Amino acid sequence according to any of aspects 1 to 9, wherein said amino acid competes with Herceptin® and Omnitarg for binding to HER2.
[1064] 11. Amino acid sequence according to any of aspects 1 to 10, wherein said amino acid sequence inhibits and/or blocks binding of Herceptin® and Omnitarg to HER2.
[1065] 12. Amino acid sequence according to any of aspects 1 to 11, wherein said amino acid sequence inhibits and/or blocks tumor cell proliferation.
[1066] 13. Amino acid sequence according to any of aspects 1 to 12, wherein said amino acid sequence inhibits, downregulates and/or blocks cell signalling.
[1067] 14. Amino acid sequence according to any of aspects 1 to 13, wherein said amino acid sequence induces apoptosis in tumor cells.
[1068] 15. Amino acid sequence according to any of aspects 1 to 14, wherein said amino acid sequence inhibits and/or blocks heterodimerization between ERBB receptors.
[1069] 16. Amino acid sequence according to any of aspects 1 to 15, wherein said amino acid sequence inhibits and/or blocks ligand activation of an ERbB hetero-oligomer comprising HER2 and HER3, HER4 or EGFR.
[1070] 17. Amino acid sequence according to any of aspects 1 to 16, wherein said amino acid sequence inhibits and/or blocks tumor vascularisation.
[1071] 18. Amino acid sequence according to any of aspects Ito 17, wherein said amino acid sequence recruits immune effector cells such as macrophages and monocytes to the tumor.
[1072] 19. Amino acid sequence according to any of aspects 1 to 18, wherein said amino acid sequence inhibits and/or blocks TNF induced signalling and/or cell proliferation.
[1073] 20. Amino acid sequence according to any of aspects 1 to 19, wherein said amino acid sequence downregulates HER2 levels and/or downregulates HER2-mediated signalling pathways.
[1074] 21. Amino acid sequence according to any of aspects 1 to 20, wherein said amino acid sequence inhibits and/or blocks metalloproteinase-mediated HER2 ectodomain shedding.
[1075] 22. Amino acid sequence according to any of aspects 1 to 21, wherein said amino acid sequence inhibits, downregulates and/or blocks ligand-mediated ErbB signalling.
[1076] 23. Amino acid sequence according to any of aspects 1 to 22, wherein said amino acid sequence inhibits and/or blocks HER2 ectodomain cleavage.
[1077] 24. Amino acid sequence according to any of aspects 1 to 23, wherein said amino acid sequence inhibits and/or blocks Heregulin-mediated activation of MAPK/Erk1/2.
[1078] 25. Amino acid sequence according to any of aspects 1 to 24, wherein said amino acid sequence inhibits and/or blocks P13K/Akt signalling.
[1079] 26. Amino acid sequence according to any of aspects 1 to 25, wherein said amino acid sequence modulates HER2 or HER2 mediated signalling via the same mechanism of action as Herceptin®.
[1080] 27. Amino acid sequence according to any of aspects 1 to 26, wherein said amino acid sequence modulates HER2 or HER2 mediated signalling via the same mechanism of action as Omnitarg.
[1081] 28. Amino acid sequence according to any of aspects 1 to 27, that is in essentially isolated form.
[1082] 29. Amino acid sequence according to aspect 1 or 28, for administration to a subject, wherein said amino acid sequence does not naturally occur in said subject.
[1083] 30. Amino acid sequence according to any of aspects 1 to 29, that can specifically bind to HER2 with a dissociation constant (K_{D}) of 10⁻⁵ to 10⁻¹² moles/litre or less, and preferably 10⁻⁷ to 10⁻¹² moles/litre or less and more preferably 10⁻⁸ to 10⁻¹² moles/litre.
[1084] 31. Amino acid sequence according to any of aspects 1 to 30, that can specifically bind to HER2 with a rate of association (kₒₙ-rate) of between 10² M⁻¹ s⁻¹ to about 10⁷ M⁻¹ s⁻¹ preferably between 10³ M⁻¹ s⁻¹ and 10⁷ M⁻¹ s⁻¹, more preferably between 10⁴ M⁻¹ s⁻¹ and 10⁷ M⁻¹ s⁻¹, such as between 10⁵ M⁻¹ s⁻¹ and 10⁷ M⁻¹ s⁻¹.
[1085] 32. Amino acid sequence according to any of aspects 1 to 31, that can specifically bind to HER2 with a rate of dissociation (k_{off} rate) between 1 s⁻¹ and 10⁻⁶ s⁻¹, preferably between 10⁻² s⁻¹ and 10⁻⁶ s⁻¹, more preferably between 10⁻³ s⁻¹ and 10⁻⁶ s⁻¹, such as between 10⁻⁴ s⁻¹ and 10⁻⁶ s⁻¹.
[1086] 33. Amino acid sequence according to any of aspects 1 to 32, that can specifically bind to HER2 with an affinity less than 500 nM, preferably less than 200 nM, more preferably less than 10 nM, such as less than 500 μM.
[1087] 34. Amino acid sequence according to any of aspects 1 to 33, that is a naturally occurring amino acid sequence (from any suitable species) or a synthetic or semi-synthetic amino acid sequence.
[1088] 35. Amino acid sequence according to any of aspects 1 to 34, that comprises an immunoglobulin fold or that under suitable conditions is capable of forming an immunoglobulin fold.
[1089] 36. Amino acid sequence according to any of aspects 1 to 35, that essentially consists of 4 framework regions (FR1 to FR4 respectively) and 3 complementarity determining regions (CDR1 to CDR3 respectively).
[1090] 37. Amino acid sequence according to any of aspects 1 to 36, that is an immunoglobulin sequence.
[1091] 38. Amino acid sequence according to any of aspects 1 to 37, that is a naturally occurring immunoglobulin sequence (from any suitable species) or a synthetic or semi-synthetic immunoglobulin sequence.
[1092] 39. Amino acid sequence according to any of aspects 1 to 38, that is a humanized immunoglobulin sequence, a camelized immunoglobulin sequence or an immunoglobulin sequence that has been obtained by techniques such as affinity maturation.
[1093] 40. Amino acid sequence according to any of aspects 1 to 39, that essentially consists of a light chain variable domain sequence (e.g. a V_{L}-sequence); or of a heavy chain variable domain sequence (e.g. a V_{H}-sequence).
[1094] 41. Amino acid sequence according to any of aspects 1 to 40, that essentially consists of a heavy chain variable domain sequence that is derived from a conventional four-chain antibody or that essentially consist of a heavy chain variable domain sequence that is derived from heavy chain antibody.
[1095] 42. Amino acid sequence according to any of aspects 1 to 41, that essentially consists of a domain antibody (or an amino acid sequence that is suitable for use as a domain antibody), of a single domain antibody (or an amino acid sequence that is suitable for use as a single domain antibody), of a “dAb” (or an amino acid sequence that is suitable for use as a dAb) or of a Nanobody® (including but not limited to a V_{HH} sequence).
[1096] 43. Amino acid sequence according to any of aspects 1 to 42, that essentially consists of a Nanobody®.
[1097] 44. Amino acid sequence according to any of aspects 1 to 43, that essentially consists of a Nanobody® that
   [1098] i) has at least 80% amino acid identity with at least one of the amino acid sequences of SEQ ID NO's: 1 to 22, in which for the purposes of determining the degree of amino acid identity, the amino acid residues that form the CDR sequences are disregarded;
   [1099] and in which:
   [1100] ii) preferably one or more of the amino acid residues at positions 11, 37, 44, 45, 47, 83, 84, 103, 104 and 108 according to the Kabat numbering are chosen from the Hallmark residues mentioned in Table A-3.
[1101] 45. Amino acid sequence according to any of aspects 1 to 44, that essentially consists of a Nanobody® that
   [1102] i) has at least 80% amino acid identity with at least one of the amino acid sequences of SEQ ID NO's: 2051-2325, in which for the purposes of determining the degree of amino acid identity, the amino acid residues that form the CDR sequences are disregarded;
   [1103] and in which:
   [1104] ii) preferably one or more of the amino acid residues at positions 11, 37, 44, 45, 47, 83, 84, 103, 104 and 108 according to the Kabat numbering are chosen from the Hallmark residues mentioned in Table A-3.
[1105] 46. Amino acid sequence according to any of aspects 1 to 45, that essentially consists of a humanized Nanobody®.
[1106] 47. Amino acid sequence according to any of aspects 1 to 46, that in addition to the at least one binding site for binding against HER2, contains one or more further binding sites for binding against other antigens, proteins or targets.
[1107] 48. Amino acid sequence directed against HER2, that comprises one or more stretches of amino acid residues chosen from the group consisting of:
   [1108] a) the amino acid sequences of SEQ ID NO's: 401-675;
   [1109] b) amino acid sequences that have at least 80% amino acid identity with at least one of the amino acid sequences of SEQ ID NO's: 401-675;
   [1110] c) amino acid sequences that have 3, 2, or 1 amino acid difference with at least one of the amino acid sequences of SEQ ID NO's: 401-675;
   [1111] d) the amino acid sequences of SEQ ID NO's: 951-1225;
   [1112] e) amino acid sequences that have at least 80% amino acid identity with at least one of the amino acid sequences of SEQ ID NO's: 951-1225;
   [1113] f) amino acid sequences that have 3, 2, or 1 amino acid difference with at least one of the amino acid sequences of SEQ ID NO's: 951-1225;
   [1114] g) the amino acid sequences of SEQ ID NO's: 1501-1775;
   [1115] h) amino acid sequences that have at least 80% amino acid identity with at least one of the amino acid sequences of SEQ ID NO's: 1501-1775;
   [1116] i) amino acid sequences that have 3, 2, or 1 amino acid difference with at least one of the amino acid sequences of SEQ ID NO's: 1501-1775;
   [1117] or any suitable combination thereof.
[1118] 49. Amino acid sequence according to aspect 48, in which at least one of said stretches of amino acid residues forms part of the antigen binding site for binding against HER2.
[1119] 50. Amino acid sequence according to any of aspects 48 or 49, that comprises two or more stretches of amino acid residues chosen from the group consisting of:
   [1120] a) the amino acid sequences of SEQ ID NO's: 401-675;
   [1121] b) amino acid sequences that have at least 80% amino acid identity with at least one of the amino acid sequences of SEQ ID NO's: 401-675;
   [1122] c) amino acid sequences that have 3, 2, or 1 amino acid difference with at least one of the amino acid sequences of SEQ ID NO's: 401-675;
   [1123] d) the amino acid sequences of SEQ ID NO's: 951-1225;
   [1124] e) amino acid sequences that have at least 80% amino acid identity with at least one of the amino acid sequences of SEQ ID NO's: 951-1225;
   [1125] f) amino acid sequences that have 3, 2, or 1 amino acid difference with at least one of the amino acid sequences of SEQ ID NO's: 951-1225;
   [1126] g) the amino acid sequences of SEQ ID NO's: 1501-1775;
   [1127] h) amino acid sequences that have at least 80% amino acid identity with at least one of the amino acid sequences of SEQ ID NO's: 1501-1775;
   [1128] i) amino acid sequences that have 3, 2, or 1 amino acid difference with at least one of the amino acid sequences of SEQ ID NO's: 1501-1775;
   [1129] such that (i) when the first stretch of amino acid residues corresponds to one of the amino acid sequences according to a), b) or c), the second stretch of amino acid residues corresponds to one of the amino acid sequences according to d), e), f), g), f) or i); (ii) when the first stretch of amino acid residues corresponds to one of the amino acid sequences according to d), e) or f), the second stretch of amino acid residues corresponds to one of the amino acid sequences according to a), b), c), g), h) or i); or (iii) when the first stretch of amino acid residues corresponds to one of the amino acid sequences according to g), h) or i), the second stretch of amino acid residues corresponds to one of the amino acid sequences according to a), b), c), d), e) or f).
[1130] 51. Amino acid sequence according to aspect 50, in which the at least two stretches of amino acid residues forms part of the antigen binding site for binding against HER2.
[1131] 52. Amino acid sequence according to any of aspects 48 to 51, that comprises three or more stretches of amino acid residues, in which the first stretch of amino acid residues is chosen from the group consisting of:
   [1132] a) the amino acid sequences of SEQ ID NO's: 401-675;
   [1133] b) amino acid sequences that have at least 80% amino acid identity with at least one of the amino acid sequences of SEQ ID NO's: 401-675;
   [1134] c) amino acid sequences that have 3, 2, or 1 amino acid difference with at least one of the amino acid sequences of SEQ ID NO's: 401-675;
   [1135] the second stretch of amino acid residues is chosen from the group consisting of:
   [1136] d) the amino acid sequences of SEQ ID NO's: 951-1225;
   [1137] e) amino acid sequences that have at least 80% amino acid identity with at least one of the amino acid sequences of SEQ ID NO's: 951-1225;
   [1138] f) amino acid sequences that have 3, 2, or 1 amino acid difference with at least one of the amino acid sequences of SEQ ID NO's: 951-1225;
   [1139] and the third stretch of amino acid residues is chosen from the group consisting of:
   [1140] g) the amino acid sequences of SEQ ID NO's: 1501-1775;
   [1141] h) amino acid sequences that have at least 80% amino acid identity with at least one of the amino acid sequences of SEQ ID NO's: 1501-1775;
   [1142] i) amino acid sequences that have 3, 2, or 1 amino acid difference with at least one of the amino acid sequences of SEQ ID NO's: 1501-1775.
[1143] 53. Amino acid sequence according to aspect 52, in which the at least three stretches of amino acid residues forms part of the antigen binding site for binding against HER2.
[1144] 54. Amino acid sequence according to any of aspects 48 to 53, in which the CDR sequences of said amino acid sequence have at least 70% amino acid identity, preferably at least 80% amino acid identity, more preferably at least 90% amino acid identity, such as 95% amino acid identity or more or even essentially 100% amino acid identity with the CDR sequences of at least one of the amino acid sequences of SEQ ID NO's: 2051-2325.
[1145] 55. Amino acid sequence directed against HER2 that cross-blocks the binding of at least one of the amino acid sequences according to any of aspects 48 to 54 to HER2.
[1146] 56. Amino acid sequence directed against HER2 that is cross-blocked from binding to HER2 by at least one of the amino acid sequences according to any of aspects 48 to 54.
[1147] 57. Amino acid sequence according to any of aspects 55 or 56, wherein the ability of said amino acid sequence to cross-block or to be cross-blocked is detected in a Biacore assay.
[1148] 58. Amino acid sequence according to any of aspects 55 to 57, wherein the ability of said amino acid sequence to cross-block or to be cross-blocked is detected in an ELISA assay.
[1149] 59. Amino acid sequence according to any of aspects 58 to 58, that is in essentially isolated form.
[1150] 60. Amino acid sequence according to any of aspects 48 to 59, for administration to a subject, wherein said amino acid sequence does not naturally occur in said subject.
[1151] 61. Amino acid sequence according to any of aspects 48 to 60, that can specifically bind to HER2 with a dissociation constant (K_{D}) of 10⁻⁵ to 10⁻¹² moles/litre or less, and preferably 10⁻⁷ to 10⁻¹² moles/litre or less and more preferably 10⁻⁸ to 10⁻¹² moles/litre.
[1152] 62. Amino acid sequence according to any of aspects 48 to 61, that can specifically bind to HER2 with a rate of association (kₒₙ-rate) of between 10² M⁻¹ s⁻¹ to about 10⁷ M⁻¹ s⁻¹, preferably between 10³ M⁻¹ s⁻¹ and 10⁷ M⁻¹ s⁻¹, more preferably between 10⁴ M⁻¹ s⁻¹ and 10⁷ M⁻¹ s⁻¹, such as between 10⁵ M⁻¹ s⁻¹ and 10⁷ M⁻¹ s⁻¹.
[1153] 63. Amino acid sequence according to any of aspects 48 to 62, that can specifically bind to HER2 with a rate of dissociation (k_{off} rate) between 1 s⁻¹ and 10⁻⁶ s⁻¹ preferably between 10⁻² s⁻¹ and 10⁻⁶ s⁻¹, more preferably between 10⁻³ s⁻¹ and 10⁻⁶ s⁻¹, such as between 10⁻⁴ s⁻¹ and 10⁻⁶ s⁻¹.
[1154] 64. Amino acid sequence according to any of aspects 48 to 63, that can specifically bind to HER2 with an affinity less than 500 nM, preferably less than 200 nM, more preferably less than 10 nM, such as less than 500 μM.
[1155] 65. Amino acid sequence according to any of aspects 48 to 64, that is a naturally occurring amino acid sequence (from any suitable species) or a synthetic or semi-synthetic amino acid sequence.
[1156] 66. Amino acid sequence according to any of aspects 48 to 65, that comprises an immunoglobulin fold or that under suitable conditions is capable of forming an immunoglobulin fold.
[1157] 67. Amino acid sequence according to any of aspects 48 to 66, that is an immunoglobulin sequence.
[1158] 68. Amino acid sequence according to any of aspects 48 to 67, that is a naturally occurring immunoglobulin sequence (from any suitable species) or a synthetic or semi-synthetic immunoglobulin sequence.
[1159] 69. Amino acid sequence according to any of aspects 48 to 68, that is a humanized immunoglobulin sequence, a camelized immunoglobulin sequence or an immunoglobulin sequence that has been obtained by techniques such as affinity maturation.
[1160] 70. Amino acid sequence according to any of aspects 48 to 69, that essentially consists of a light chain variable domain sequence (e.g. a V_{L}-sequence); or of a heavy chain variable domain sequence (e.g. a V_{H}-sequence).
[1161] 71. Amino acid sequence according to any of aspects 48 to 70, that essentially consists of a heavy chain variable domain sequence that is derived from a conventional four-chain antibody or that essentially consist of a heavy chain variable domain sequence that is derived from heavy chain antibody.
[1162] 72. Amino acid sequence according to any of aspects 48 to 71, that essentially consists of a domain antibody (or an amino acid sequence that is suitable for use as a domain antibody), of a single domain antibody (or an amino acid sequence that is suitable for use as a single domain antibody), of a “dAb” (or an amino acid sequence that is suitable for use as a dAb) or of a Nanobody® (including but not limited to a V_{HH} sequence).
[1163] 73. Amino acid sequence according to any of aspects 48 to 72, that essentially consists of a Nanobody®.
[1164] 74. Amino acid sequence according to any of aspects 48 to 73, that essentially consists of a Nanobody® that
   [1165] i) has at least 80% amino acid identity with at least one of the amino acid sequences of SEQ ID NO's: 1 to 22, in which for the purposes of determining the degree of amino acid identity, the amino acid residues that form the CDR sequences are disregarded;
   [1166] and in which:
   [1167] ii) preferably one or more of the amino acid residues at positions 11, 37, 44, 45, 47, 83, 84, 103, 104 and 108 according to the Kabat numbering are chosen from the Hallmark residues mentioned in Table A-3.
[1168] 75. Amino acid sequence according to any of aspects 48 to 74, that essentially consists of a Nanobody® that
   [1169] i) has at least 80% amino acid identity with at least one of the amino acid sequences of SEQ ID NO's: 2051-2325, in which for the purposes of determining the degree of amino acid identity, the amino acid residues that form the CDR sequences are disregarded;
   [1170] and in which:
   [1171] ii) preferably one or more of the amino acid residues at positions 11, 37, 44, 45, 47, 83, 84, 103, 104 and 108 according to the Kabat numbering are chosen from the Hallmark residues mentioned in Table A-3.
[1172] 76. Amino acid sequence according to any of aspects 48 to 75, that essentially consists of a humanized Nanobody®.
[1173] 77. Amino acid sequence according to any of aspects 1 to 76, that in addition to the at least one binding site for binding formed by the CDR sequences, contains one or more further binding sites for binding against other antigens, proteins or targets.
[1174] 78. Amino acid sequence that essentially consists of 4 framework regions (FR1 to FR4, respectively) and 3 complementarity determining regions (CDR1 to CDR3, respectively), in which:
   [1175] CDR1 is chosen from the group consisting of:
   [1176] a) the amino acid sequences of SEQ ID NO's: 401-675;
   [1177] b) amino acid sequences that have at least 80% amino acid identity with at least one of the amino acid sequences of SEQ ID NO's: 401-675;
   [1178] c) amino acid sequences that have 3, 2, or 1 amino acid difference with at least one of the amino acid sequences of SEQ ID NO's: 401-675;
   [1179] and/or
   [1180] CDR2 is chosen from the group consisting of:
   [1181] d) the amino acid sequences of SEQ ID NO's: 951-1225;
   [1182] e) amino acid sequences that have at least 80% amino acid identity with at least one of the amino acid sequences of SEQ ID NO's: 951-1225;
   [1183] f) amino acid sequences that have 3, 2, or 1 amino acid difference with at least one of the amino acid sequences of SEQ ID NO's: 951-1225;
   [1184] and/or
   [1185] CDR3 is chosen from the group consisting of:
   [1186] g) the amino acid sequences of SEQ ID NO's: 1501-1775;
   [1187] h) amino acid sequences that have at least 80% amino acid identity with at least one of the amino acid sequences of SEQ ID NO's: 1501-1775;
   [1188] i) amino acid sequences that have 3, 2, or 1 amino acid difference with at least one of the amino acid sequences of SEQ ID NO's: 1501-1775.
[1189] 79. Amino acid sequence that essentially consists of 4 framework regions (FR1 to FR4, respectively) and 3 complementarity determining regions (CDR1 to CDR3, respectively), in which:
   [1190] CDR1 is chosen from the group consisting of:
   [1191] a) the amino acid sequences of SEQ ID NO's: 401-675;
   [1192] b) amino acid sequences that have at least 80% amino acid identity with at least one of the amino acid sequences of SEQ ID NO's: 401-675;
   [1193] c) amino acid sequences that have 3, 2, or 1 amino acid difference with at least one of the amino acid sequences of SEQ ID NO's: 401-675;
   [1194] and
   [1195] CDR2 is chosen from the group consisting of:
   [1196] d) the amino acid sequences of SEQ ID NO's: 951-1225;
   [1197] e) amino acid sequences that have at least 80% amino acid identity with at least one of the amino acid sequences of SEQ ID NO's: 951-1225;
   [1198] f) amino acid sequences that have 3, 2, or 1 amino acid difference with at least one of the amino acid sequences of SEQ ID NO's: 951-1225;
   [1199] and
   [1200] CDR3 is chosen from the group consisting of:
   [1201] g) the amino acid sequences of SEQ ID NO's: 1501-1775;
   [1202] h) amino acid sequences that have at least 80% amino acid identity with at least one of the amino acid sequences of SEQ ID NO's: 1501-1775;
   [1203] i) amino acid sequences that have 3, 2, or 1 amino acid difference with at least one of the amino acid sequences of SEQ ID NO's: 1501-1775].
[1204] 80. Amino acid sequence according to any of aspects 78 to 79, in which the CDR sequences of said amino acid sequence have at least 70% amino acid identity, preferably at least 80% amino acid identity, more preferably at least 90% amino acid identity, such as 95% amino acid identity or more or even essentially 100% amino acid identity with the CDR sequences of at least one of the amino acid sequences of SEQ ID NO's: 2051-2325.
[1205] 81. Amino acid sequence directed against HER2 that cross-blocks the binding of at least one of the amino acid sequences according to any of aspects 78 to 80 to HER2.
[1206] 82. Amino acid sequence directed against HER2 that is cross-blocked from binding to HER2 by at least one of the amino acid sequences according to any of aspects 78 to 80.
[1207] 83. Amino acid sequence according to any of aspects 81 or 82, wherein the ability of said amino acid sequence to cross-block or to be cross-blocked is detected in a Biacore assay.
[1208] 84. Amino acid sequence according to any of aspects 81 to 83, wherein the ability of said amino acid sequence to cross-block or to be cross-blocked is detected in an ELISA assay.
[1209] 85. Amino acid sequence according to any of aspects 78 to 84, that is in essentially isolated form.
[1210] 86. Amino acid sequence according to any of aspects 78 to 85, for administration to a subject, wherein said amino acid sequence does not naturally occur in said subject.
[1211] 87. Amino acid sequence according to any of aspects 78 to 86, that can specifically bind to HER2 with a dissociation constant (K_{D}) of 10⁻⁵ to 10⁻¹² moles/litre or less, and preferably 10⁻⁷ to 10⁻¹² moles/litre or less and more preferably 10⁻⁸ to 10⁻¹² moles/litre.
[1212] 88. Amino acid sequence according to any of aspects 78 to 87, that can specifically bind to HER2 with a rate of association (kₒₙ-rate) of between 10² M⁻¹ s⁻¹ to about 10⁷ M⁻¹ s⁻¹, preferably between 10³ M⁻¹ s⁻¹ and 10⁷ M⁻¹ s⁻¹, more preferably between 10⁴ M⁻¹ s⁻¹ and 10⁷ M⁻¹ s⁻¹, such as between 10⁵ M⁻¹ s⁻¹ and 10⁷ M⁻¹ s⁻¹.
[1213] 89. Amino acid sequence according to any of aspects 78 to 88, that can specifically bind to HER2 with a rate of dissociation (k_{off} rate) between 1 s⁻¹ and 10⁻⁶ s⁻¹ preferably between 10⁻² s⁻¹ and 10⁻⁶ s⁻¹, more preferably between 10⁻³ s⁻¹ and 10⁻⁶ s⁻¹, such as between 10⁻⁴ s⁻¹ and 10⁻⁶ S⁻¹.
[1214] 90. Amino acid sequence according to any of aspects 78 to 89, that can specifically bind to HER2 with an affinity less than 500 nM, preferably less than 200 nM, more preferably less than 10 nM, such as less than 500 μM.
[1215] 91. Amino acid sequence according to any of aspects 78 to 90, that is a naturally occurring amino acid sequence (from any suitable species) or a synthetic or semi-synthetic amino acid sequence.
[1216] 92. Amino acid sequence according to any of aspects 78 to 91, that comprises an immunoglobulin fold or that under suitable conditions is capable of forming an immunoglobulin fold.
[1217] 93. Amino acid sequence according to any of aspects 78 to 92, that is an immunoglobulin sequence.
[1218] 94. Amino acid sequence according to any of aspects 78 to 93, that is a naturally occurring immunoglobulin sequence (from any suitable species) or a synthetic or semi-synthetic immunoglobulin sequence.
[1219] 95. Amino acid sequence according to any of aspects 78 to 94, that is a humanized immunoglobulin sequence, a camelized immunoglobulin sequence or an immunoglobulin sequence that has been obtained by techniques such as affinity maturation.
[1220] 96. Amino acid sequence according to any of aspects 78 to 95, that essentially consists of a light chain variable domain sequence (e.g. a V_{L}-sequence); or of a heavy chain variable domain sequence (e.g. a V_{H}-sequence).
[1221] 97, Amino acid sequence according to any of aspects 78 to 96, that essentially consists of a heavy chain variable domain sequence that is derived from a conventional four-chain antibody or that essentially consist of a heavy chain variable domain sequence that is derived from heavy chain antibody.
[1222] 98. Amino acid sequence according to any of aspects 78 to 97, that essentially consists of a domain antibody (or an amino acid sequence that is suitable for use as a domain antibody), of a single domain antibody (or an amino acid sequence that is suitable for use as a single domain antibody), of a “dAb” (or an amino acid sequence that is suitable for use as a dAb) or of a Nanobody® (including but not limited to a V_{HH} sequence).
[1223] 99. Amino acid sequence according to any of aspects 78 to 98, that essentially consists of a Nanobody®.
[1224] 100. Amino acid sequence according to any of aspects 78 to 99, that essentially consists of a Nanobody® that
   [1225] i) has at least 80% amino acid identity with at least one of the amino acid sequences of SEQ ID NO's: 1 to 22, in which for the purposes of determining the degree of amino acid identity, the amino acid residues that form the CDR sequences are disregarded;
   [1226] and in which:
   [1227] ii) preferably one or more of the amino acid residues at positions 11, 37, 44, 45, 47, 83, 84, 103, 104 and 108 according to the Kabat numbering are chosen from the Hallmark residues mentioned in Table A-3.
[1228] 101. Amino acid sequence according to any of aspects 78 to 100, that essentially consists of a Nanobody® that
   [1229] i) has at least 80% amino acid identity with at least one of the amino acid sequences of SEQ ID NO's: 2051-2325, in which for the purposes of determining the degree of amino acid identity, the amino acid residues that form the CDR sequences are disregarded;
   [1230] and in which:
   [1231] ii) preferably one or more of the amino acid residues at positions 11, 37, 44, 45, 47, 83, 84, 103, 104 and 108 according to the Kabat numbering are chosen from the Hallmark residues mentioned in Table A-3.
[1232] 102. Amino acid sequence according to any of aspects 78 to 101, that essentially consists of a humanized Nanobody®.
[1233] 103. Amino acid sequence according to any of aspects 78 to 102, that in addition to the at least one binding site for binding formed by the CDR sequences, contains one or more further binding sites for binding against other antigens, proteins or targets.
[1234] 104. Nanobody that is directed against and/or that can specifically bind to HER2.
[1235] 105. Nanobody according to aspect 104, wherein said Nanobody competes with Herceptin® for binding to HER2.
[1236] 106. Nanobody according to any of aspects 104 or 105, wherein said Nanobody inhibits and/or blocks binding of Herceptin® to HER2.
[1237] 107. Nanobody according to any of aspects 104 to 106, wherein said Nanobody is directed against the Herceptin® binding site on HER2.
[1238] 108. Nanobody according to any of aspects 104 to 107, wherein said Nanobody specifically binds to domain IV of HER2.
[1239] 109. Nanobody according to aspect 104, wherein said Nanobody competes with Omnitarg for binding to HER2.
[1240] 110. Nanobody according to any of aspects 104 or 109, wherein said Nanobody inhibits and/or blocks binding of Omnitarg to HER2.
[1241] 111. Nanobody according to any of aspects 109 or 110, wherein said Nanobody is directed against the Omnitarg binding site on HER2.
[1242] 112. Nanobody according to any of aspects 109 to 111, wherein said Nanobody specifically binds to domain II of HER2.
[1243] 113. Nanobody according to any of aspects 104 to 112, wherein said Nanobody competes with Herceptin® and Omnitarg for binding to HER2.
[1244] 114. Nanobody according to any of aspects 104 to 113, wherein said Nanobody inhibits and/or blocks binding of Herceptin® and Omnitarg to HER2.
[1245] 115. Nanobody according to any of aspects 104 to 114, wherein said Nanobody inhibits and/or blocks tumor cell proliferation.
[1246] 116. Nanobody according to any of aspects 104 to 115, wherein said Nanobody inhibits, downregulates and/or blocks cell signalling.
[1247] 117. Nanobody according to any of aspects 104 to 116, wherein said Nanobody induces apoptosis in tumor cells.
[1248] 118. Nanobody according to any of aspects 104 to 117, wherein said Nanobody inhibits and/or blocks heterodimerization between ERBB receptors.
[1249] 119. Nanobody according to any of aspects 104 to 118, wherein said Nanobody inhibits and/or blocks ligand activation of an ERbB hetero-oligomer comprising HER2 and HER3, HER4 or EGFR.
[1250] 120. Nanobody according to any of aspects 104 to 119, wherein said Nanobody inhibits and/or blocks tumor vascularisation.
[1251] 121. Nanobody according to any of aspects 104 to 120, wherein said Nanobody recruits immune effector cells such as macrophages and monocytes to the tumor.
[1252] 122. Nanobody according to any of aspects 104 to 121, wherein said Nanobody inhibits and/or blocks TNF induced signalling and/or cell proliferation.
[1253] 123. Nanobody according to any of aspects 104 to 122, wherein said Nanobody downregulates HER2 levels and/or downregulates HER2-mediated signalling pathways.
[1254] 124. Nanobody according to any of aspects 104 to 123, wherein said Nanobody inhibits and/or blocks metalloproteinase-mediated HER2 ectodomain shedding.
[1255] 125. Nanobody according to any of aspects 104 to 124, wherein said Nanobody downregulates and/or blocks ligand-mediated ErbB signalling.
[1256] 126. Nanobody according to any of aspects 104 to 125, wherein said Nanobody inhibits and/or blocks HER2 ectodomain cleavage.
[1257] 127. Nanobody according to any of aspects 104 to 126, wherein said Nanobody inhibits and/or blocks Heregulin-mediated activation of MAPK/Erk1/2.
[1258] 128. Nanobody according to any of aspects 104 to 127, wherein said Nanobody inhibits and/or blocks PI3K/Akt signalling.
[1259] 129. Nanobody according to any of aspects 104 to 128, wherein said Nanobody modulates HER2 or HER2 mediated signalling via the same mechanism of action as Herceptin®.
[1260] 130. Nanobody according to any of aspects 104 to 129, wherein said Nanobody modulates HER2 or HER2 mediated signalling via the same mechanism of action as Omnitarg.
[1261] 131. Nanobody according to any of aspects 104 to 130, that is in essentially isolated form.
[1262] 132. Nanobody according to any of aspects 104 to 131, that can specifically bind to HER2 with a dissociation constant (K_{D}) of 10⁻⁵ to 10⁻¹² moles/litre or less, and preferably 10⁻⁷ to 10⁻¹² moles/litre or less and more preferably 10⁻⁸ to 10⁻¹² moles/litre.
[1263] 133. Nanobody according to any of aspects 104 to 132, that can specifically bind to HER2 with a rate of association (kₒₙ-rate) of between 10² M⁻¹ s⁻¹ to about 10⁷ M⁻¹ s⁻¹, preferably between 10³ M⁻¹ s⁻¹ and 10⁷ M⁻¹ s⁻¹, more preferably between 10⁴ M⁻¹ s⁻¹ and 10⁷ M⁻¹ s⁻¹, such as between 10⁵ M⁻¹ s⁻¹ and 10⁷ M⁻¹ s⁻¹.
[1264] 134. Nanobody according to any of aspects 104 to 133, that can specifically bind to HER2 with a rate of dissociation (k_{off} rate) between 1 s⁻¹ and 10⁻⁶ s⁻¹ preferably between 10⁻² s⁻¹ and 10⁻⁶ s⁻¹, more preferably between 10⁻³ s⁻¹ and 10⁻⁶ s⁻¹, such as between 10⁻⁴ s⁻¹ and 10⁻⁶ s⁻¹.
[1265] 135. Nanobody according to any of aspects 104 to 134, that can specifically bind to HER2 with an affinity less than 500 nM, preferably less than 200 nM, more preferably less than 10 nM, such as less than 500 μM.
[1266] 136. Nanobody according to any of aspects 104 to 135, that is a naturally occurring Nanobody (from any suitable species) or a synthetic or semi-synthetic Nanobody.
[1267] 137. Nanobody according to any of aspects 104 to 136, that is a V_{HH} sequence, a partially humanized V_{HH} sequence, a fully humanized V_{HH} sequence, a camelized heavy chain variable domain or a Nanobody that has been obtained by techniques such as affinity maturation.
[1268] 138. Nanobody according to any of aspects 104 to 137, that
   [1269] i) has at least 80% amino acid identity with at least one of the amino acid sequences of SEQ ID NO's: 1 to 22, in which for the purposes of determining the degree of amino acid identity, the amino acid residues that form the CDR sequences are disregarded;
   [1270] and in which:
   [1271] ii) preferably one or more of the amino acid residues at positions 11, 37, 44, 45, 47, 83, 84, 103, 104 and 108 according to the Kabat numbering are chosen from the Hallmark residues mentioned in Table A-3.
[1272] 139. Nanobody according to any of aspects 104 to 138, that
   [1273] i) has at least 80% amino acid identity with at least one of the amino acid sequences of SEQ ID NO's: 2051-2325, in which for the purposes of determining the degree of amino acid identity, the amino acid residues that form the CDR sequences are disregarded;
   [1274] and in which:
   [1275] ii) preferably one or more of the amino acid residues at positions 11, 37, 44, 45, 47, 83, 84, 103, 104 and 108 according to the Kabat numbering are chosen from the Hallmark residues mentioned in Table A-3.
[1276] 140. Nanobody according to any of aspects 104 to 139, in which:
   [1277] CDR1 is chosen from the group consisting of:
   [1278] a) the amino acid sequences of SEQ ID NO's: 401-675;
   [1279] b) amino acid sequences that have at least 80% amino acid identity with at least one of the amino acid sequences of SEQ ID NO's: 401-675;
   [1280] c) amino acid sequences that have 3, 2, or 1 amino acid difference with at least one of the amino acid sequences of SEQ ID NO's: 401-675;
   [1281] and/or
   [1282] CDR2 is chosen from the group consisting of:
   [1283] d) the amino acid sequences of SEQ ID NO's: 951-1225;
   [1284] e) amino acid sequences that have at least 80% amino acid identity with at least one of the amino acid sequences of SEQ ID NO's: 951-1225;
   [1285] f) amino acid sequences that have 3, 2, or 1 amino acid difference with at least one of the amino acid sequences of SEQ ID NO's: 951-1225;
   [1286] and/or
   [1287] CDR3 is chosen from the group consisting of:
   [1288] g) the amino acid sequences of SEQ ID NO's: 1501-1775;
   [1289] h) amino acid sequences that have at least 80% amino acid identity with at least one of the amino acid sequences of SEQ ID NO's: 1501-1775;
   [1290] i) amino acid sequences that have 3, 2, or 1 amino acid difference with at least one of the amino acid sequences of SEQ ID NO's: 1501-1775.
[1291] 141. Nanobody according to any of aspects 104 to 140, in which:
   [1292] CDR1 is chosen from the group consisting of:
   [1293] a) the amino acid sequences of SEQ ID NO's: 401-675;
   [1294] b) amino acid sequences that have at least 80% amino acid identity with at least one of the amino acid sequences of SEQ ID NO's: 401-675;
   [1295] c) amino acid sequences that have 3, 2, or 1 amino acid difference with at least one of the amino acid sequences of SEQ ID NO's: 401-675;
   [1296] and
   [1297] CDR2 is chosen from the group consisting of:
   [1298] d) the amino acid sequences of SEQ ID NO's: 951-1225;
   [1299] e) amino acid sequences that have at least 80% amino acid identity with at least one of the amino acid sequences of SEQ ID NO's: 951-1225;
   [1300] f) amino acid sequences that have 3, 2, or 1 amino acid difference with at least one of the amino acid sequences of SEQ ID NO's: 951-1225;
   [1301] and
   [1302] CDR3 is chosen from the group consisting of:
   [1303] g) the amino acid sequences of SEQ ID NO's: 1501-1775;
   [1304] h) amino acid sequences that have at least 80% amino acid identity with at least one of the amino acid sequences of SEQ ID NO's: 1501-1775;
   [1305] i) amino acid sequences that have 3, 2, or 1 amino acid difference with at least one of the amino acid sequences of SEQ ID NO's: 1501-1775.
[1306] 142. Nanobody according to any of aspects 104 to 141, in which the CDR sequences have at least 70% amino acid identity, preferably at least 80% amino acid identity, more preferably at least 90% amino acid identity, such as 95% amino acid identity or more or even essentially 100% amino acid identity with the CDR sequences of at least one of the amino acid sequences of SEQ ID NO's: 2051-2325.
[1307] 143. Nanobody according to any of aspects 104 to 1.42, which is a partially humanized Nanobody.
[1308] 144. Nanobody according to any of aspects 104 to 143, which is a fully humanized Nanobody.
[1309] 145. Nanobody according to any of aspects 104 to 144, that is chosen from the group consisting of SEQ ID NO's: 2051-2325 or from the group consisting of amino acid sequences that have more than 80%, preferably more than 90%, more preferably more than 95%, such as 99% or more sequence identity (as defined herein) with at least one of the amino acid sequences of SEQ ID NO's: 2051-2325.
[1310] 146. Nanobody according to any of aspects 104 to 145, that is chosen from the group consisting of SEQ ID NO's: 2051-2325.
[1311] 147. Nanobody directed against HER2 that cross-blocks the binding of at least one of the Nanobodies according to any of aspects 140 to 146 to HER2.
[1312] 148. Nanobody directed against HER2 that is cross-blocked from binding to HER2 by at least one of the Nanobodies according to any of aspects 140 to 146.
[1313] 149. Nanobody according to any of aspects 147 or 148, wherein the ability of said Nanobody to cross-block or to be cross-blocked is detected in a Biacore assay.
[1314] 150. Nanobody according to any of aspects 147 to 149, wherein the ability of said Nanobody to cross-block or to be cross-blocked is detected in an ELISA assay.
[1315] 151. Compound or construct, that comprises or essentially consists of one or more amino acid sequences according to any of aspects 1 to 103 and/or one or more Nanobodies according to any of aspects 104 to 150, and optionally further comprises one or more other groups, residues, moieties or binding units, optionally linked via one or more linkers.
[1316] 152. Compound or construct according to aspect 151, in which said one or more other groups, residues, moieties or binding units are amino acid sequences.
[1317] 153. Compound or construct according to aspect 151, in which said one or more linkers, if present, are one or more amino acid sequences.
[1318] 154. Compound or construct according to any of aspects 151 to 153, in which said one or more other groups, residues, moieties or binding units are immunoglobulin sequences.
[1319] 155. Compound or construct according to any of aspects 151 to 154, in which said one or more other groups, residues, moieties or binding units are chosen from the group consisting of domain antibodies, amino acid sequences that are suitable for use as a domain antibody, single domain antibodies, amino acid sequences that are suitable for use as a single domain antibody, “dAb”'s, amino acid sequences that are suitable for use as a dAb, or Nanobodies.
[1320] 156. Compound or construct according to any of aspect 151 to 155, in which said one or more amino acid sequences of the invention are immunoglobulin sequences.
[1321] 157. Compound or construct according to any of aspects 151 to 156, in which said one or more amino acid sequences of the invention are chosen from the group consisting of domain antibodies, amino acid sequences that are suitable for use as a domain antibody, single domain antibodies, amino acid sequences that are suitable for use as a single domain antibody, “dAb”'s, amino acid sequences that are suitable for use as a dAb, or Nanobodies.
[1322] 158. Compound or construct, that comprises or essentially consists of one or more Nanobodies according to any of aspects 104 to 150 and in which said one or more other groups, residues, moieties or binding units are Nanobodies.
[1323] 159. Compound or construct according to any of aspects 151 to 158, which is a multivalent construct.
[1324] 160. Compound or construct according to aspect 159, that is chosen from the group consisting of SEQ ID NO's: 2326-2330 or from the group consisting of from amino acid sequences that have more than 80%, preferably more than 90%, more preferably more than 95%, such as 99% or more sequence identity (as defined herein) with at least one of the amino acid sequences of SEQ ID NO's: 2326-2330.
[1325] 161. Compound or construct according to any of aspects 151 to 160, which is a multiparatopic construct.
[1326] 162. Compound or construct according to aspect 161, which is a biparatopic or triparatopic construct.
[1327] 163. Compound or construct according to aspect 162, which comprises at least one amino acid sequence directed against a first antigenic determinant, epitope, part or domain of HER-2 and at least one amino acid sequence directed against a second antigenic determinant, epitope, part or domain of HER-2 different from the first antigenic determinant, epitope, part or domain
[1328] 164. Biparatopic compound or construct according to aspect 163, which is capable of simultaneously binding to said first antigenic determinant, epitope, part or domain of HER2 and to said second antigenic determinant, epitope, part or domain of HER2.
[1329] 165. Compound or construct according to any of aspects 151 to 164, which combines two or more different modes of action each mediated by one of its binding units, wherein each binding unit binds at a different binding site of HER2.
[1330] 166. Compound or construct according to any of aspects 151 to 165, which modulates, inhibits, downregulate and/or blocks two different cell signaling pathways, each mediated by one of its binding units, wherein each binding unit binds at a different binding site of HER2.
[1331] 167. Compound or construct according to aspect 151 to 166, wherein said compound or construct competes with Herceptin® for binding to HER2.
[1332] 168. Compound or construct according to any of aspects 151 to 167, wherein said compound or construct inhibits and/or blocks binding of Herceptin® to HER2.
[1333] 169. Compound or construct according to any of aspects 151 to 168, wherein said compound or construct is directed against the Herceptin® binding site on HER2.
[1334] 170. Compound or construct according to any of aspects 151 to 169, wherein said compound or construct specifically binds to domain IV of HER2.
[1335] 171. Compound or construct according to any of aspects 151 to 170, wherein said compound or construct recruits immune effector cells such as macrophages and monocytes to the tumor.
[1336] 172. Compound or construct according to any of aspects 151 to 171, wherein said compound or construct downregulates HER2 levels and/or downregulates HER2-mediated signalling pathways.
[1337] 173. Compound or construct according to any of aspects 151 to 172, wherein said compound or construct inhibits and/or blocks metalloproteinase-mediated. HER2 ectodomain shedding.
[1338] 174. Compound or construct according to any of aspects 151 to 173, wherein said compound or construct modulates HER2 or HER2 mediated signalling via the same mechanism of action as Herceptin®.
[1339] 175. Compound or construct according to aspect 151 to 174, wherein said compound or construct competes with Omnitarg for binding to HER2.
[1340] 176. Compound or construct according to any of aspects 151 to 175, wherein said compound or construct inhibits and/or blocks binding of Omnitarg to HER2.
[1341] 177. Compound or construct according to any of aspects 151 to 176, wherein said compound or construct is directed against the Omnitarg binding site on HER2.
[1342] 178. Compound or construct according to any of aspects 151 to 177, wherein said compound or construct specifically binds to domain II of HER2.
[1343] 179. Compound or construct according to any of aspects 151 to 178, wherein said compound or construct inhibits and/or blocks ligand activation of an ERbB hetero-oligomer comprising HER2 and HER3, HER4 or EGFR.
[1344] 180. Compound or construct according to any of aspects 151 to 179, wherein said compound or construct is directed against the Herceptin® binding site on HER2 and against the Omnitarg binding site on HER2.
[1345] 181. Compound or construct according to any of aspects 151 to 180, wherein said compound or construct modulates HER2 or HER2 mediated signalling via the same mechanism of action as Omnitarg.
[1346] 182. Compound or construct according to any of aspects 151 to 181, wherein said compound or construct competes with Herceptin® and Omnitarg for binding to HER2.
[1347] 183. Compound or construct according to any of aspects 151 to 182, wherein said compound or construct inhibits and/or blocks binding of Herceptin® and Omnitarg to HER2.
[1348] 184. Compound or construct according to any of aspects 151 to 183, which specifically binds the Omnitarg binding site on HER2 and to the Herceptin® binding site on HER2.
[1349] 185. Compound or construct according to any of aspects 151 to 184, which specifically binds to domain IV and domain II of HER2.
[1350] 186. Biparatopic compound or construct according to any of aspects 151 to 185, which can simultaneously bind the Omnitarg binding site on HER2 and to the Herceptin® binding site on HER2.
[1351] 187. Compound or construct according to any of aspects 151 to 186, which down-regulates HER2 levels while at the same time inhibiting and/or blocking heterodimerization between ERBB receptors.
[1352] 188. Compound or construct according to any of aspects 151 to 187, which combines the mode of action of Herceptin® and Omnitarg.
[1353] 189. Compound or construct according to any of aspects 151 to 188, wherein said compound or construct inhibits and/or blocks tumor cell proliferation.
[1354] 190. Compound or construct according to any of aspects 151 to 189, wherein said compound or construct inhibits, downregulates and/or blocks cell signalling.
[1355] 191. Compound or construct according to any of aspects 151 to 190, wherein said compound or construct induces apoptosis in tumor cells.
[1356] 192. Compound or construct according to any of aspects 151 to 191, wherein said compound or construct inhibits and/or blocks heterodimerization between ERBB receptors.
[1357] 193. Compound or construct according to any of aspects 151 to 192, wherein said compound or construct inhibits and/or blocks tumor vascularisation.
[1358] 194. Compound or construct according to any of aspects 151 to 193, wherein said compound or construct inhibits and/or blocks TNF induced signalling and/or cell proliferation.
[1359] 195. Compound or construct according to any of aspects 151 to 194, wherein said compound or construct inhibits, downregulates and/or blocks ligand-mediated ErbB signalling.
[1360] 196. Compound or construct according to any of aspects 151 to 195, wherein said compound or construct inhibits and/or blocks HER2 ectodomain cleavage.
[1361] 197. Compound or construct according to any of aspects 151 to 196, wherein said compound or construct inhibits and/or blocks Heregulin-mediated activation of MAPK/Erk1/2.
[1362] 198. Compound or construct according to any of aspects 151 to 197, wherein said compound or construct inhibits and/or blocks PI3K/Akt
[1363] 199. Compound or construct according to any of aspects 151 to 198, wherein said compound or construct is linked to an Fc portion.
[1364] 200. Compound or construct that comprises an Fc portion that is linked, optionally via a suitable linker or hinge region, to a pair of first amino acid sequences according to any of aspects 1 to 103 or Nanobodies according to any of aspects 104 to 150, which are linked, optionally via a suitable linker, to a pair of second amino acid sequences according to any of aspects 1 to 103 or Nanobodies according to any of aspects 104 to 150, wherein:
   [1365] both of the first amino acid sequences according to any of aspects 1 to 103 or Nanobodies according to any of aspects 104 to 150 are directed against a first epitope, antigenic determinant, part, domain or subunit on HER2; and
   [1366] both of the second amino acid sequences according to any of aspects 1 to 103 or Nanobodies according to any of aspects 104 to 150 are directed against a second epitope, antigenic determinant, part, domain or subunit on HER2 which is different from said first epitope, antigenic determinant, part, domain or subunit.
[1367] 201. Compound or construct according to any of aspects 199 or 200, wherein the first amino acid sequences according to any of aspects 1 to 103 or Nanobodies according to any of aspects 104 to 150 are directed against the Herceptin® binding site on HER-2 and/or are amino acid sequences or Nanobodies that are capable of competing with Herceptin® for binding to HER-2.
[1368] 202. Compound or construct according to any of aspects 199 to 201, wherein the first amino acid sequences according to any of aspects 1 to 103 or Nanobodies according to any of aspects 104 to 150 are directed against the Omnitarg® binding site on HER-2 and/or are amino acid sequences or Nanobodies that are capable of competing with Omnitarg® for binding to HER-2.
[1369] 203. Compound or construct according to any of aspects 199 to 202, wherein the first amino acid sequences according to any of aspects 1 to 103 or Nanobodies according to any of aspects 104 to 150 are directed against the Herceptin® binding site on HER-2 and/or are amino acid sequences or Nanobodies that are capable of competing with Herceptin® for binding to HER-2 and the second amino acid sequences according to any of aspects 1 to 103 or Nanobodies according to any of aspects 104 to 150 are directed against the Omnitarg® binding site on HER-2 and/or are amino acid sequences or Nanobodies that are capable of competing with Omnitarg® for binding to HER-2 (or visa versa).
[1370] 204. Compound or construct according to any of aspects 151 to 203, that comprises or that is chosen from the group consisting of SEQ ID NO's: 2336-2390 or from the group consisting of from amino acid sequences that have more than 80%, preferably more than 90%, more preferably more than 95%, such as 99% or more sequence identity (as defined herein) with at least one of the amino acid sequences of SEQ ID NO's: 2336-2390.
[1371] 205. Compound or construct according to any of aspects 151 to 204, which is a multispecific construct.
[1372] 206. Compound or construct according to any of aspects 151 to 205, which has an increased half-life, compared to the corresponding amino acid sequence according to any of aspects 1 to 103 per se or Nanobody according to any of aspects 104 to 150 per se, respectively.
[1373] 207. Compound or construct according to any of aspects 151 to 206, in which said one or more other groups, residues, moieties or binding units provide the compound or construct with increased half-life, compared to the corresponding amino acid sequence according to any of aspects 1 to 103 per se or Nanobody according to any of aspects 104 to 150 per se, respectively.
[1374] 208. Compound or construct according to aspect 207, in which said one or more other groups, residues, moieties or binding units that provide the compound or construct with increased half-life is chosen from the group consisting of serum proteins or fragments thereof, binding units that can bind to serum proteins, an Fc portion, and small proteins or peptides that can bind to serum proteins.
[1375] 209. Compound or construct according to aspect 207, in which said one or more other groups, residues, moieties or binding units that provide the compound or construct with increased half-life is chosen from the group consisting of human serum albumin or fragments thereof.
[1376] 210. Compound or construct according to aspect 207, in which said one or more other groups, residues, moieties or binding units that provides the compound or construct with increased half-life are chosen from the group consisting of binding units that can bind to serum albumin (such as human serum albumin) or a serum immunoglobulin (such as IgG).
[1377] 211. Compound or construct according to aspect 207, in which said one or more other groups, residues, moieties or binding units that provides the compound or construct with increased half-life are chosen from the group consisting of domain antibodies, amino acid sequences that are suitable for use as a domain antibody, single domain antibodies, amino acid sequences that are suitable for use as a single domain antibody, “dAb”'s, amino acid sequences that are suitable for use as a dAb, or Nanobodies that can bind to serum albumin (such as human serum albumin) or a serum immunoglobulin (such as IgG).
[1378] 212. Compound or construct according to aspect 207, in which said one or more other groups, residues, moieties or binding units that provides the compound or construct with increased half-life is a Nanobody that can bind to serum albumin (such as human serum albumin) or a serum immunoglobulin (such as IgG).
[1379] 213. Compound or construct according to any of aspects 206 to 212, that has a serum half-life that is at least 1.5 times, preferably at least 2 times, such as at least 5 times, for example at least 10 times or more than 20 times, greater than the half-life of the corresponding amino acid sequence according to any of aspects 1 to 103 per se or Nanobody according to any of aspects 104 to 150 per se, respectively.
[1380] 214. Compound or construct according to any of aspects 206 to 213, that has a serum half-life that is increased with more than 1 hours, preferably more than 2 hours, more preferably more than 6 hours, such as more than 12 hours, or even more than 24, 48 or 72 hours, compared to the corresponding amino acid sequence according to any of aspects 1 to 103 per se or Nanobody according to any of aspects 104 to 150 per se, respectively.
[1381] 215. Compound or construct according to any of aspects 206 to 214, that has a serum half-life in human of at least about 12 hours, preferably at least 24 hours, more preferably at least 48 hours, even more preferably at least 72 hours or more; for example, of at least 5 days (such as about 5 to 10 days), preferably at least 9 days (such as about 9 to 14 days), more preferably at least about 10 days (such as about 10 to 15 days), or at least about 11 days (such as about 11 to 16 days), more preferably at least about 12 days (such as about 12 to 18 days or more), or more than 14 days (such as about 14 to 19 days).
[1382] 216. Compound or construct according to any of aspects 151 to 215, in which said one or more other groups, residues, moieties or binding units are one or more constant domains.
[1383] 217. Compound or construct according to aspect 216, wherein said one or more constant domains are two constant domains that can be used as part of/to form an Fc portion.
[1384] 218. Compound or construct according to any of aspects 216 or 217, wherein said one or more constant domains are three constant domains that can be used as part of/to form an Fc portion.
[1385] 219. Compound or construct according to any of aspects 216 to 218, wherein said one or more constant domains confer one or more effector functions to the compound or construct.
[1386] 220. Compound or construct according to any of aspects 216 to 219, wherein said one or more constant domains confer the ability to bind to one or more Fc receptors.
[1387] 221. Compound or construct according to any of aspects 216 to 220, in which said one or more amino acid sequences or Nanobodies are linked to the Fc portion via a linker or hinge region.
[1388] 222. Compound or construct according to any of aspects 216 to 221, wherein said one or more constant domains are from IgG (e.g. from IgG1, IgG2, IgG3 or IgG4).
[1389] 223. Compound or construct according to any of aspects 216 to 221, wherein said one or more constant domains are from human Ig such as IgA, IgD or IgM.
[1390] 224. Compound or construct according to any of aspects 216 to 221, wherein said one or more constant domains are from IgE.
[1391] 225. Compound or construct that comprises two amino acids according to any of aspects 1 to 103 or Nanobodies according to any of aspects 104 to 150 and an Fc portion that is capable of effecting one or more IgE-mediated immune responses and/or that is capable of binding to either the FcεRI receptor and/or the FcεRII receptor.
[1392] 226. Compound or construct according to aspect 225, comprising two polypeptide chains, in which each polypeptide chain comprises at least one amino acid sequence according to any of aspects 1 to 103 or at least one Nanobody according to any of aspects 104 to 150 that is linked, optionally via a suitable linker or hinge region, to one or more constant domains, in which the constant domains from the first polypeptide chain and the second polypeptide chains together form an Fc portion that is capable of effecting one or more IgE-mediated immune responses and/or that is capable of binding to either the FcεRI receptor and/or the FcεRII receptor.
[1393] 227. Compound or construct according to any of aspects 224 to 226, in which the Fc portion is capable of binding to FcεRI with an affinity (expressed as the Kₐ value) better than 10⁶ M⁻¹, preferably better than 10⁸ M⁻¹, more preferably better than 10⁹ M⁻¹, such as with a Kₐ value of about 10¹⁰ M⁻¹ or 10¹¹ M⁻¹.
[1394] 228. Compound or construct according to any of aspects 224 to 227, in which the Fc portion is capable of binding to FcεRII with an affinity (expressed as the Kₐ value) better than 10⁶ M⁻¹, preferably better than 10⁷ M⁻¹, such as with a Kₐ value of about 10⁸ M⁻¹.
[1395] 229. Compound or construct according to any of aspects 224 to 228, in which the Fc portion comprises at least one or more parts, fragments, amino acid stretches or domains of the Fc portion of IgE.
[1396] 230. Compound or construct according to any of aspects 224 to 229, in which the Fc portion comprises at least one or more of those parts, fragments, amino acid stretches or domains of the Fc portion of IgE that allow IgE to bind to its receptors.
[1397] 231. Compound or construct according to any of aspects 224 to 230, in which the Fc portion at least comprises C_{ε}4 (or a suitable part of fragment thereof), and optionally also comprises C_{ε}3 (or a suitable part of fragment thereof) and/or C_{ε}2 (or a suitable part of fragment thereof).
[1398] 232. Compound or construct according to any of aspects 224 to 231, in which the Fc portion essentially consist of three constant domains.
[1399] 233. Compound or construct according to any of aspects 224 to 232, in which the parts, fragments, amino acid stretches or domains that make up the IgE-derived Fc portion are preferably all or essentially all derived from human Fc portions.
[1400] 234. Compound or construct according to any of aspects 224 to 233, in which the IgE-derived Fc portion is from human IgE.
[1401] 235. Monovalent construct, comprising or essentially consisting of one amino acid sequence according to any of aspects 1 to 103 and/or one Nanobody according to any of aspects 104 to 150.
[1402] 236. Monovalent construct according to aspect 235, in which said amino acid sequence is chosen from the group consisting of domain antibodies, amino acid sequences that are suitable for use as a domain antibody, single domain antibodies, amino acid sequences that are suitable for use as a single domain antibody, “dAb”'s, amino acid sequences that are suitable for use as a dAb, or Nanobodies.
[1403] 237. Monovalent construct, comprising or essentially consisting of one Nanobody according to any of aspects 104 to 150.
[1404] 238. Monovalent construct, that is chosen from the group consisting of SEQ ID NO's: 2051-2325 or from the group consisting of amino acid sequences that have more than 80%, preferably more than 90%, more preferably more than 95%, such as 99% or more sequence identity (as defined herein) with at least one of the amino acid sequences of SEQ ID NO's: 2051-2325.
[1405] 239. Use of a monovalent construct according to any of aspects 235 to 238, in preparing a multivalent compound or construct according to any of aspects 151 to 234.
[1406] 240. Use of a monovalent construct according to aspect 239, in preparing a multiparatopic construct such as a biparatopic construct.
[1407] 241. Use of a monovalent construct according to any of aspects 239 or 240, wherein the monovalent construct is used as a binding domain or binding unit in preparing a multivalent construct comprising two or more binding units.
[1408] 242. Use of a monovalent construct according to any of aspects 239 to 241, in preparing a multivalent construct that exhibits intramolecular binding compared to intermolecular binding.
[1409] 243. Use of a monovalent construct according to any of aspects 239 to 242, as a binding domain or binding unit in preparing a multivalent construct, wherein the binding domains or binding units are linked via a linker such that the multivalent construct preferably exhibits intramolecular binding compared to intermolecular binding.
[1410] 244. Use of a monovalent construct according to any of aspects 239 to 243, wherein the monovalent construct is directed against the Omnitarg binding site on HER2 and/or is capable of competing with Omnitarg for binding to HER-2.
[1411] 245. Use of a monovalent construct according to any of aspects 239 to 244, wherein the monovalent construct is directed against domain II of HER2.
[1412] 246. Use of a monovalent construct according to any of aspects 239 to 245, wherein the monovalent construct is directed against the middle of domain II of HER2.
[1413] 247. Use of a monovalent construct according to any of aspects 239 to 243, wherein the monovalent construct is directed against the Herceptin® binding site on HER2.
[1414] 248. Use of a monovalent construct according to any of aspects 239 to 243 or 247, wherein the monovalent construct is directed against domain IV of HER2.
[1415] 249. Use of a monovalent construct according to any of aspects 239 to 243 or 247 to 248, wherein the monovalent construct is directed against the C-terminus of domain IV of HER2.
[1416] 250. Use of two monovalent constructs according to any of aspects 239 to 249, wherein a first monovalent construct is directed against the Omnitarg binding site on HER2 (and in particular against domain II of HER2, and more in particular against the middle of domain II of HER2) and/or is capable of competing with Omnitarg for binding to HER-2 and wherein the second monovalent construct is directed against the Herceptin® binding site on HER2 (and in particular against domain IV of HER2, and more in particular against the C-terminus of domain IV of HER2) and/or is capable of competing with Herceptin® for binding to HER-2.
[1417] 251. Nucleic acid or nucleotide sequence, that encodes an amino acid sequence according to any of aspects 1 to 103, a Nanobody according to any of aspects 104 to 150, a compound or construct according to any of aspects 151 to 234 that is such that it can be obtained by expression of a nucleic acid or nucleotide sequence encoding the same, or a monovalent construct according to any of aspects 235 to 238.
[1418] 252. Nucleic acid or nucleotide sequence according to aspect 251, that is in the form of a genetic construct.
[1419] 253. Use of a nucleic acid or nucleotide sequence according to aspect 251, that encodes a monovalent construct according to any of aspects 235 to 238, for the preparation of a genetic construct that encodes a multivalent construct according to any of aspects 151 to 234.
[1420] 254. Use of a nucleic acid or nucleotide sequence according to aspect 253, wherein the genetic construct encodes a multiparatopic (such as a biparatopic) construct.
[1421] 255. Host or host cell that expresses, or that under suitable circumstances is capable of expressing, an amino acid sequence according to any of aspects 1 to 103, a Nanobody according to any of aspects 104 to 150, a compound or construct according to any of aspects 151 to 234 that is such that it can be obtained by expression of a nucleic acid or nucleotide sequence encoding the same, or a monovalent construct according to any of aspects 235 to 238; and/or that comprises a nucleic acid or nucleotide sequence according to aspect 251, or a genetic construct according to aspect 252.
[1422] 256. Method for producing an amino acid sequence according to any of aspects 1 to 103, a Nanobody according to any of aspects 104 to 150, a compound or construct according to any of aspects 151 to 234 that is such that it can be obtained by expression of a nucleic acid or nucleotide sequence encoding the same, or a monovalent construct according to any of aspects 235 to 238, said method at least comprising the steps of:
   [1423] a) expressing, in a suitable host cell or host organism or in another suitable expression system, a nucleic acid or nucleotide sequence according to aspect 251, or a genetic construct according to aspect 252
   [1424] optionally followed by:
   [1425] b) isolating and/or purifying the amino acid sequence according to any of aspects 1 to 103, the Nanobody according to any of aspects 104 to 150, the compound or construct according to any of aspects 151 to 234 that is such that it can be obtained by expression of a nucleic acid or nucleotide sequence encoding the same, or the monovalent construct according to any of aspects 235 to 238 thus obtained.
[1426] 257. Method for producing an amino acid sequence according to any of aspects 1 to 103, a Nanobody according to any of aspects 104 to 150, a compound or construct according to any of aspects 151 to 234 that is such that it can be obtained by expression of a nucleic acid or nucleotide sequence encoding the same, or a monovalent construct according to any of aspects 235 to 238, said method at least comprising the steps of:
   [1427] a) cultivating and/or maintaining a host or host cell according to aspect 255 under conditions that are such that said host or host cell expresses and/or produces at least one amino acid sequence according to any of aspects 1 to 103, Nanobody according to any of aspects 104 to 150, compound or construct according to any of aspects 151 to 234 that is such that it can be obtained by expression of a nucleic acid or nucleotide sequence encoding the same, or a monovalent construct according to any of aspects 235 to 238,
   [1428] optionally followed by:
   [1429] b) isolating and/or purifying the amino acid sequence according to any of aspects 1 to 103, the Nanobody according to any of aspects 104 to 150, the compound or construct according to any of aspects 151 to 234 that is such that it can be obtained by expression of a nucleic acid or nucleotide sequence encoding the same, or the monovalent construct according to any of aspects 235 to 238 thus obtained.
[1430] 258. Method for preparing and/or generating a multiparatopic (such as e.g. biparatopic, triparatopic, etc.) construct according to any of aspects 161 to 204, said method comprising at least the steps of:
   [1431] a) providing a nucleic acid sequence according to aspect 251, encoding a first HER2 binding amino acid sequence, fused to a set, collection or library of nucleic acid sequences encoding amino acid sequences;
   [1432] b) screening said set, collection or library of nucleic acid sequences for nucleic acid sequences that encode a second amino acid sequence that can bind to and/or has affinity for an antigenic determinant on HER2 different from the antigenic determinant recognized by the first HER2 binding amino acid sequence;
   [1433] and
   [1434] c) isolating the nucleic acid sequence encoding an HER2 binding amino acid sequence fused to the nucleic acid sequence obtained in b), followed by expressing the encoded construct.
[1435] 259. Method for preparing and/or generating a biparatopic construct according to any of aspects 161 to 204, said method comprising at least the steps of:
   [1436] a) providing a set, collection or library of nucleic acid sequences, in which each nucleic acid sequence in said set, collection or library encodes a fusion protein that comprises a first amino acid sequence that can bind to and/or has affinity for a first antigenic determinant, part, domain or epitope on HER2 that is fused (optionally via a linker sequence) to a second amino acid sequence, in which essentially each second amino acid sequence (or most of these) is a different member of a set, collection or library of different amino acid sequences;
   [1437] b) screening said set, collection or library of nucleic acid sequences for nucleic acid sequences that encode an amino acid sequence that can bind to and/or has affinity for a second antigenic determinant, part, domain or epitope on HER2 different from the first antigenic determinant, part, domain or epitope on HER-2;
   [1438] and
   [1439] c) isolating the nucleic acid sequences that encode an amino acid sequence that can bind to and/or has affinity for a second antigenic determinant, part, domain or epitope on HER2 different from the first antigenic determinant, part, domain or epitope on HER-2, obtained in b), optionally followed by expressing the encoded amino acid sequence.
[1440] 260. Method according to aspect 259, wherein the first amino acid is also encoded by a set, collection or library of nucleic acid sequences and wherein, in step b), said set, collection or library of nucleic acid sequences is screened for nucleic acid sequences that encode an amino acid sequence that can bind to and/or has affinity for the first antigenic determinant, part, domain or epitope on HER2.
[1441] 261. Method according to aspect 260, wherein the screening in step b) is performed in a single step.
[1442] 262. Method according to aspect 260, wherein the screening in step b) is performed in subsequent steps.
[1443] 263. Method according to any of aspects 258 to 262, wherein the first amino acid sequence used in step a) is preferably such that (i) it can bind to and/or has affinity for the Herceptin® binding site on HER2 (and in particular domain IV of HER2, more in particular the C-terminus of domain IV of HER2) and/or (ii) competes with Herceptin® for binding to HER-2.
[1444] 264. Method according to any of aspects 258 to 263, wherein in step b), the set, collection or library of nucleic acid sequences is screened for nucleic acid sequences that encode (i) an amino acid sequence that can bind to and/or has affinity for the Omnitarg binding site on HER2 (and in particular domain TI of HER2, more in particular the middle of domain II of HER2) and/or (ii) an amino acid sequence that can compete with Omnitarg or Omnitarg Fab for binding to HER-2.
[1445] 265. Method according to any of aspects 258 to 264, wherein the first amino acid sequence used in step a) is preferably such that (i) it can bind to and/or has affinity for the Omnitarg binding site on HER2 (and in particular domain II of HER2, more in particular the middle of domain H of HER2) and/or (ii) competes with Omnitarg for binding to HER-2.
[1446] 266. Method according to any of aspects 258 to 265, wherein in step b), the set, collection or library of nucleic acid sequences is screened for nucleic acid sequences that encode (i) an amino acid sequence that can bind to and/or has affinity for the Herceptin® binding site on HER2 (and in particular domain IV of HER2, more in particular the C-terminus of domain IV of HER2) and/or (ii) an amino acid sequence that can compete with Herceptin® for binding to HER-2.
[1447] 267. Method according to any of aspects 258 to 266, wherein in step b), the set, collection or library of nucleic acid sequences is screened for nucleic acid sequences that both (i) encode an amino acid sequence that can bind to and/or has affinity for the Omnitarg binding site on HER2 (and in particular domain II of HER2, more in particular the middle of domain II of HER2) and/or that can compete with Omnitarg or Omnitarg Fab for binding to HER-2 and that also (ii) encode an amino acid sequence that can bind to and/or has affinity for the Herceptin® binding site on HER2 (and in particular domain IV of HER2, more in particular the C-terminus of domain IV of HER2) and/or that can compete with Herceptin® for binding to HER-2.
[1448] 268. Method according to aspect 267, wherein the screening in step b) is performed in a single step.
[1449] 269. Method according to aspect 267, wherein the screening in step b) is performed in a subsequent steps.
[1450] 270. Method according to any of aspects 258 to 269, wherein the screening in step b) is performed in the presence of Herceptin® and/or Omnitarg.
[1451] 271. Method for screen for suitable and/or optimal linker lengths for linking a first and a second amino acid sequence in a biparatopic constructs according to any of aspects 161 to 204, wherein said method comprises at least the steps of:
   [1452] d) providing a set, collection or library of nucleic acid sequences, in which each nucleic acid sequence in said set, collection or library encodes a fusion protein that comprises a first amino acid sequence that can bind to and/or has affinity for a first antigenic determinant, part, domain or epitope on HER2 that is fused via a linker sequence to a second amino acid sequence that has can bind to and/or has affinity for a second antigenic determinant, part, domain or epitope on HER2 (which may be the same or different as the first antigenic determinant, part, domain or epitope on HER2), in which essentially each nucleic acid sequence (or most of these) encodes a fusion protein with a different linker sequence so as to provide a set, collection or library encoding different fusion proteins;
   [1453] e) screening said set, collection or library of nucleic acid sequences for nucleic acid sequences that encode an amino acid sequence that can bind to and/or has affinity for the first and second antigenic determinant, part, domain or epitope on HER2;
   [1454] and
   [1455] f) isolating the nucleic acid sequences that encode an amino acid sequence that can bind to and/or has affinity for the first and second antigenic determinant, part, domain or epitope on HER2, optionally followed by expressing the encoded amino acid sequence.
[1456] 272. Method according to aspect 271, wherein the first amino acid sequence is an amino acid sequence that can bind to and/or has affinity for the Omnitarg binding site on HER2 (and may in particular domain II of HER2, more in particular the middle of domain II of HER2) and/or that can compete with Omnitarg or Omnitarg Fab.
[1457] 273. Method according to aspect 271, wherein the second amino acid sequence is an amino acid sequence that can bind to and/or has affinity for the Herceptin® binding site on HER2 (and in particular domain IV of HER2, more in particular the C-terminus of domain IV of HER2) and/or that can compete with Herceptin® for binding to HER-2.
[1458] 274. Method according to aspect 271, wherein the first amino acid sequence is an amino acid sequence that can bind to and/or has affinity for the Omnitarg binding site on HER2 (and may in particular domain. II of HER2, more in particular the middle of domain II of HER2) and/or that can compete with Omnitarg or Omnitarg Fab and wherein the second amino acid sequence is an amino acid sequence that can bind to and/or has affinity for the Herceptin® binding site on HER2 (and in particular domain IV of HER2, more in particular the C-terminus of domain IV of HER2) and/or that can compete with Herceptin® for binding to HER-2.
[1459] 275. Method according to any of aspects 271 to 274, wherein the screening in step b) is performed in a single step.
[1460] 276. Method according to any of aspects 271 to 274, wherein the screening in step b) is performed in subsequent steps.
[1461] 277. Method according to any of aspects 271 to 276, wherein the screening in step b) is performed in the presence of Herceptin® and/or Omnitarg.
[1462] 278. Method for preparing and/or generating biparatopic constructs according to any of aspects 161 to 204, said method comprising at least the steps of:
   [1463] a) providing a set, collection or library of nucleic acid sequences encoding amino acid sequences;
   [1464] b) screening said set, collection or library of nucleic acid sequences for a set, collection or library of nucleic acid sequences that encode an amino acid sequence that can bind to and/or has affinity for HER2;
   [1465] c) ligating said set, collection or library of nucleic acid sequences that encode an amino acid sequence that can bind to and/or has affinity for HER2 to another nucleic acid sequence that encodes an amino acid sequence that can bind to and/or has affinity for HER2 (e.g. a nucleic acid sequence that encodes an amino acid sequence that competes with Herceptin® for binding HER2);
   [1466] and
   [1467] d) from the set, collection or library of nucleic acid sequences obtained in c), isolating the nucleic acid sequences encoding a biparatopic amino acid sequence that can bind to and/or has affinity for HER2 (and e.g. further selecting for nucleic acid sequences that encode a biparatopic amino acid sequence that antagonizes with higher potency compared to the monovalent amino acid sequences), followed by expressing the encoded amino acid sequence.
[1468] 279. Method for preparing and/or generating biparatopic constructs according to any of aspects, said method comprising at least the steps of:
   [1469] a) providing a first set, collection or library of nucleic acid sequences encoding amino acid sequences;
   [1470] b) screening said first set, collection or library of nucleic acid sequences for a nucleic acid sequence that encodes an amino acid sequence that can bind to and/or has affinity for a first antigenic determinant, part, domain or epitope on HER2;
   [1471] c) ligating the nucleic acid sequence encoding said amino acid sequence that can bind to and/or has affinity for a first antigenic determinant, part, domain or epitope on HER2 obtained in b) to another set, collection or library of nucleic acid sequences encoding amino acid sequences to obtain a set, collection or library of nucleic acid sequences that encode fusion proteins;
   [1472] d) screening said set, collection or library of nucleic acid sequences obtained in step c) for a nucleic acid sequence that encodes an amino acid sequence that can bind to and has affinity for a second antigenic determinant, part, domain or epitope on HER2 which is the same or different from the first antigenic determinant, part, domain or epitope on HER-2;
   [1473] and
   [1474] e) isolating the nucleic acid sequence that encodes an amino acid sequence that can bind to and/or has affinity for the first and second antigenic determinant, part, domain or epitope on HER2, optionally followed by expressing the encoded amino acid sequence.
[1475] 280. Method according to aspect 279, wherein in step b), the set, collection or library of nucleic acid sequences is screened for nucleic acid sequences that encode a first amino acid sequence that (i) can bind to and/or has affinity for the Herceptin® binding site on HER2 (and in particular domain IV of HER2, more in particular the C-terminus of domain IV of HER2) and/or (ii) competes with Herceptin® for binding to HER-2.
[1476] 281. Method according to aspect 279, wherein in step d), the set, collection or library of nucleic acid sequences is screened for nucleic acid sequences that encode a second amino acid sequence that (i) can bind to and/or has affinity for the Omnitarg binding site on HER2 (and in particular domain. II of HER2, more in particular the middle of domain II of HER2) and/or (ii) that can compete with Omnitarg or Omnitarg Fab for binding to HER-2.
[1477] 282. Method according to aspect 279, wherein in step b), the set, collection or library of nucleic acid sequences is screened nucleic acid sequences that encode a first amino acid sequence that (i) can bind to and/or has affinity for the Herceptin® binding site on HER2 (and in particular domain IV of HER2, more in particular the C-terminus of domain IV of HER2) and/or (ii) competes with Herceptin® for binding to HER-2 and wherein in step d), the set, collection or library of nucleic acid sequences is screened for nucleic acid sequences that encode a second amino acid sequence that (i) can bind to and/or has affinity for the Omnitarg binding site on HER2 (and in particular domain II of HER2, more in particular the middle of domain II of HER2) and/or (ii) that can compete with Omnitarg or Omnitarg Fab for binding to HER-2 (or visa versa).
[1478] 283. Method according to aspect 279, wherein in step b), the set, collection or library of nucleic acid sequences is screened nucleic acid sequences that encode a first amino acid sequence that (i) can bind to and/or has affinity for the Omnitarg binding site on HER2 (and in particular domain II of HER2, more in particular the middle of domain II of HER2) and/or (ii) competes with Omnitarg for binding to HER-2.
[1479] 284. Method according to aspect 279, wherein in step d), the set, collection or library of nucleic acid sequences is screened for nucleic acid sequences that encode a second amino acid sequence that (i) can bind to and/or has affinity for the Herceptin® binding site on HER2 (and in particular domain IV of HER2, more in particular the C-terminus of domain IV of HER2) and/or (ii) that can compete with Herceptin® for binding to HER-2.
[1480] 285. Method according to aspect 279, wherein in step b), the set, collection or library of nucleic acid sequences is screened nucleic acid sequences that encode a first amino acid sequence that (i) can bind to and/or has affinity for the Omnitarg binding site on HER2 (and in particular domain H of HER2, more in particular the middle of domain II of HER2) and/or (ii) competes with Omnitarg for binding to HER-2 and wherein in step d), the set, collection or library of nucleic acid sequences is screened for nucleic acid sequences that encode a second amino acid sequence that (i) can bind to and/or has affinity for the Herceptin® binding site on HER2 (and in particular domain IV of HER2, more in particular the C-terminus of domain. IV of HER2) and/or (ii) that can compete with Herceptin® for binding to HER-2.
[1481] 286. Method according to aspect 285, wherein the screening in steps b) and/or d) is performed in the presence of Herceptin® and/or Omnitarg.
[1482] 287. Method for preparing and/or generating a biparatopic constructs according to any of aspects 161 to 204, said method comprising at least the steps of linking two or more monovalent amino acid sequences or monovalent construct according to any of aspects 235 to 238 and for example one or more linkers.
[1483] 288. Method according to aspect 287, comprising the steps of:
   [1484] a) linking two or more nucleic acid sequences according to aspect 251, encoding a monovalent construct according to any of aspects 235 to 238 (and also for example nucleic acids encoding one or more linkers and further one or more further elements of genetic constructs known per se) to obtain a genetic construct according to aspect 252;
   [1485] b) expressing, in a suitable host cell or host organism or in another suitable expression system, the genetic construct obtained in a)
   [1486] optionally followed by:
   [1487] c) isolating and/or purifying the biparatopic constructs according to any of aspects 161 to 204 thus obtained.
[1488] 289. Composition, comprising at least one amino acid sequence according to any of aspects 1 to 103, Nanobody according to any of aspects 104 to 150, compound or construct according to any of aspects 151 to 234, monovalent construct according to any of aspects 235 to 238, or nucleic acid or nucleotide sequence according to aspects 251 to 252.
[1489] 290. Composition according to aspect 289, which is a pharmaceutical composition.
[1490] 291. Composition according to aspect 289, which is a pharmaceutical composition, that further comprises at least one pharmaceutically acceptable carrier, diluent or excipient and/or adjuvant, and that optionally comprises one or more further pharmaceutically active polypeptides and/or compounds.
[1491] 292. Method for the prevention and/or treatment of at least one cancer and/or tumor, said method comprising administering, to a subject in need thereof, a pharmaceutically active amount of at least one amino acid sequence according to any of aspects 1 to 103, Nanobody according to any of aspects 104 to 150, compound or construct according to any of aspects 151 to 234, monovalent construct according to any of aspects 235 to 238, or composition according to aspect 290 or 291.
[1492] 293. Method for the prevention and/or treatment of at least one disease or disorder that is associated with HER2, with its biological or pharmacological activity, and/or with the biological pathways or signalling in which HER2 is involved, said method comprising administering, to a subject in need thereof, a pharmaceutically active amount of at least one amino acid sequence according to any of aspects 1 to 103, Nanobody according to any of aspects 104 to 150, compound or construct according to any of aspects 151 to 234, monovalent construct according to any of aspects 235 to 238, or composition according to aspect 290 or 291.
[1493] 294. Method for the prevention and/or treatment of at least one disease or disorder that can be prevented and/or treated by administering, to a subject in need thereof, an amino acid sequence according to any of aspects 1 to 103, a Nanobody according to any of aspects 104 to 150, a compound or construct according to any of aspects 151 to 234, or a monovalent construct according to any of aspects 235 to 238, said method comprising administering, to a subject in need thereof, a pharmaceutically active amount of at least one amino acid sequence according to any of aspects 1 to 103, Nanobody according to any of aspects 104 to 150, compound or construct according to any of aspects 151 to 234, monovalent construct according to any of aspects 235 to 238, or composition according to aspect 290 or 291.
[1494] 295. Method for immunotherapy, said method comprising administering, to a subject in need thereof, a pharmaceutically active amount of at least one amino acid sequence according to any of aspects 1 to 103, Nanobody according to any of aspects 104 to 150, compound or construct according to any of aspects 151 to 234, monovalent construct according to any of aspects 235 to 238, or composition according to aspect 290 or 291.
[1495] 296. Use of an amino acid sequence according to any of aspects 1 to 103, a Nanobody according to any of aspects 104 to 150, a compound or construct according to any of aspects 151 to 234, or a monovalent construct according to any of aspects 235 to 238 in the preparation of a pharmaceutical composition for prevention and/or treatment of at least one cancer and/or tumor; and/or for use in one or more of the methods according to aspects 292 to 295.
[1496] 297. An amino acid sequence according to any of aspects 1 to 103, a Nanobody according to any of aspects 104 to 150, a compound or construct according to any of aspects 151 to 234, or a monovalent construct according to any of aspects 235 to 238 for use in the prevention and/or treatment of at least one cancer and/or tumor; and/or for use in one or more of the methods according to aspects 292 to 295.
[1497] 298. Part or fragment of an amino acid sequence according to any of aspects 1 to 103, or of a Nanobody according to any of aspects 104 to 150.
[1498] 299. Part or fragment according to aspect 298, that can specifically bind to HER2.
[1499] 300. Part or fragment according to aspect 299, wherein said part or fragment competes with Herceptin® for binding to HER2.
[1500] 301. Part of fragment according to any of aspects 299 or 300, wherein said part or fragment inhibits and/or blocks binding of Herceptin® to HER2.
[1501] 302. Part or fragment according to any of aspects 299 to 301, wherein said part or fragment is directed against the Herceptin® binding site on HER2.
[1502] 303. Part of fragment according to any of aspects 299 to 302, wherein said part or fragment specifically binds to domain IV of HER2.
[1503] 304. Part of fragment according to aspect 299, wherein said part or fragment competes with Omnitarg for binding to HER2.
[1504] 305. Part of fragment according to any of aspects 299 or 304, wherein said part or fragment inhibits and/or blocks binding of Omnitarg to HER2.
[1505] 306. Part of fragment according to any of aspects 304 or 305, wherein said part or fragment is directed against the Omnitarg binding site on HER2.
[1506] 307. Part of fragment according to any of aspects 304 to 306, wherein said part or fragment specifically binds to domain II of HER2.
[1507] 308. Part of fragment according to any of aspects 299 to 307, wherein said part or fragment competes with Herceptin® and Omnitarg for binding to HER2.
[1508] 309. Part of fragment according to any of aspects 299 to 308, wherein said part or fragment inhibits and/or blocks binding of Herceptin® and Omnitarg to HER2.
[1509] 310. Part of fragment according to any of aspects 299 to 309, wherein said part or fragment inhibits and/or blocks tumor cell proliferation.
[1510] 311. Part of fragment according to any of aspects 299 to 310, wherein said part or fragment inhibits, downregulates and/or blocks cell signalling.
[1511] 312. Part of fragment according to any of aspects 299 to 311, wherein said part or fragment induces apoptosis in tumor cells.
[1512] 313. Part of fragment according to any of aspects 299 to 312, wherein said part or fragment inhibits and/or blocks heterodimerization between ERBB receptors.
[1513] 314. Part of fragment according to any of aspects 299 to 313, wherein said part or fragment inhibits and/or blocks ligand activation of an ERbB hetero-oligomer comprising HER2 and HER3, HER4 or EGFR.
[1514] 315. Part of fragment according to any of aspects 299 to 314, wherein said part or fragment inhibits and/or blocks tumor vascularisation.
[1515] 316. Part of fragment according to any of aspects 299 to 315, wherein said part or fragment recruits immune effector cells such as macrophages and monocytes to the tumor.
[1516] 317. Part of fragment according to any of aspects 299 to 316, wherein said part or fragment inhibits and/or blocks TNF induced signalling and/or cell proliferation.
[1517] 318. Part of fragment according to any of aspects 299 to 317, wherein said part or fragment downregulates HER2 levels and/or downregulates HER2-mediated signalling pathways.
[1518] 319. Part of fragment according to any of aspects 299 to 318, wherein said part or fragment inhibits and/or blocks metalloproteinase-mediated HER2 ectodomain shedding.
[1519] 320. Part of fragment according to any of aspects 299 to 319, wherein said part or fragment inhibits, downregulates and/or blocks ligand-mediated ErbB signalling.
[1520] 321. Part of fragment according to any of aspects 299 to 320, wherein said part or fragment inhibits and/or blocks HER2 ectodomain cleavage.
[1521] 322. Part of fragment according to any of aspects 299 to 321, wherein said part or fragment inhibits and/or blocks Heregulin-mediated activation of MAPK/Erk1/2.
[1522] 323. Part of fragment according to any of aspects 299 to 322, wherein said part or fragment inhibits and/or blocks PI3K/Akt signalling.
[1523] 324. Part of fragment according to any of aspects 299 to 323, wherein said part or fragment modulates HER2 or HER2 mediated signalling via the same mechanism of action as Herceptin®.
[1524] 325. Part of fragment according to any of aspects 299 to 324, wherein said part or fragment modulates HER2 or HER2 mediated signalling via the same mechanism of action as Omnitarg.
[1525] 326. Part of fragment according to any of aspects 299 to 325, that can specifically bind to HER2 with a dissociation constant (K_{D}) of 10⁻⁵ to 10⁻¹² moles/litre or less, and preferably 10⁻⁷ to 10⁻¹² moles/litre or less and more preferably 10⁻⁸ to 10⁻¹² moles/litre.
[1526] 327. Part or fragment according to any of aspects 299 to 326, that can specifically bind to HER2 with a rate of association (kₒₙ-rate) of between 10² M⁻¹ s⁻¹ to about 10⁷ M⁻¹ s⁻¹, preferably between 10³ M⁻¹ s⁻¹ and 10⁷ M⁻¹ s⁻¹, more preferably between 10⁴ M⁻¹ s⁻¹ and 10⁷ M⁻¹ s⁻¹, such as between 10⁵ M⁻¹ s⁻¹ and 10⁷ M⁻¹ s⁻¹.
[1527] 328. Part or fragment according to any of aspects 299 to 327, that can specifically bind to HER2 with a rate of dissociation (k_{off} rate) between 1 s⁻¹ and 10⁻⁶ s⁻¹ preferably between 10⁻² s⁻¹ and 10⁻⁶ s⁻¹, more preferably between 10⁻³ s⁻¹ and 10⁻⁶ s⁻¹, such as between 10⁻⁴ s⁻¹ and 10⁻⁶ s⁻¹.
[1528] 329. Compound or construct, that comprises or essentially consists of one or more parts or fragments according to any of aspects 299 to 328, and optionally further comprises one or more other groups, residues, moieties or binding units, optionally linked via one or more linkers.
[1529] 330. Compound or construct according to aspect 329, in which said one or more other groups, residues, moieties or binding units are amino acid sequences.
[1530] 331. Compound or construct according to aspect 329, in which said one or more linkers, if present, are one or more amino acid sequences.
[1531] 332. Nucleic acid or nucleotide sequence, that encodes a part or fragment according to any of aspects 299 to 328 or a compound or construct according to any of aspects 329 to 331 that is such that it can be obtained by expression of a nucleic acid or nucleotide sequence encoding the same.
[1532] 333. Composition, comprising at least one part or fragment according to any of aspects 299 to 328, compound or construct according to any of aspects 329 to 331, or nucleic acid or nucleotide sequence according to aspect 332.
[1533] 334. Derivative of an amino acid sequence according to any of aspects 1 to 103, or of a Nanobody according to any of aspects 104 to 150.
[1534] 335. Derivative according to aspect 334, that can specifically bind to HER2.
[1535] 336. Derivative according to aspect 335, wherein said derivative competes with Herceptin® for binding to HER2.
[1536] 337. Derivative according to any of aspects 335 or 336, wherein said derivative inhibits and/or blocks binding of Herceptin® to HER2.
[1537] 338. Derivative according to any of aspects 335 to 337, wherein said derivative is directed against the Herceptin® binding site on HER2.
[1538] 339. Derivative according to any of aspects 335 to 338, wherein said derivative specifically binds to domain IV of HER2.
[1539] 340. Derivative according to aspect 335, wherein said derivative competes with Omnitarg for binding to HER2.
[1540] 341. Derivative according to any of aspects 335 or 340, wherein said derivative inhibits and/or blocks binding of Omnitarg to HER2.
[1541] 342. Derivative according to any of aspects 340 or 341, wherein said derivative is directed against the Omnitarg binding site on HER2.
[1542] 343. Derivative according to any of aspects 340 to 342, wherein said derivative specifically binds to domain II of HER2.
[1543] 344. Derivative according to any of aspects 335 to 343, wherein said derivative competes with Herceptin® and Omnitarg for binding to HER2.
[1544] 345. Derivative according to any of aspects 335 to 344, wherein said derivative inhibits and/or blocks binding of Herceptin® and Omnitarg to HER2.
[1545] 346. Derivative according to any of aspects 335 to 345, wherein said derivative inhibits and/or blocks tumor cell proliferation.
[1546] 347. Derivative according to any of aspects 335 to 346, wherein said derivative inhibits, downregulates and/or blocks cell signalling.
[1547] 348. Derivative according to any of aspects 335 to 347, wherein said derivative induces apoptosis in tumor cells.
[1548] 349. Derivative according to any of aspects 335 to 348, wherein said derivative inhibits and/or blocks heterodimerization between ERBB receptors.
[1549] 350. Derivative according to any of aspects 335 to 349, wherein said derivative inhibits and/or blocks ligand activation of an ERbB hetero-oligomer comprising HER2 and HER3, HER4 or EGFR.
[1550] 351. Derivative according to any of aspects 335 to 350, wherein said derivative inhibits and/or blocks tumor vascularisation.
[1551] 352. Derivative according to any of aspects 335 to 351, wherein said derivative recruits immune effector cells such as macrophages and monocytes to the tumor.
[1552] 353. Derivative according to any of aspects 335 to 352, wherein said derivative inhibits and/or blocks TNF induced signalling and/or cell proliferation.
[1553] 354. Derivative according to any of aspects 335 to 353, wherein said derivative down-regulates HER2 levels and/or downregulates HER2-mediated signalling pathways.
[1554] 355. Derivative according to any of aspects 335 to 354, wherein said derivative inhibits and/or blocks metalloproteinase-mediated HER2 ectodomain shedding.
[1555] 356. Derivative according to any of aspects 335 to 355, wherein said derivative inhibits, downregulates and/or blocks ligand-mediated ErbB signalling.
[1556] 357. Derivative according to any of aspects 335 to 356, wherein said derivative inhibits and/or blocks HER2 ectodomain cleavage.
[1557] 358. Derivative according to any of aspects 335 to 357, wherein said derivative inhibits and/or blocks Heregulin-mediated activation of MAPK/Erk1/2.
[1558] 359. Derivative according to any of aspects 335 to 358, wherein said derivative inhibits and/or blocks PI3K/Akt
[1559] 360. Derivative according to any of aspects 335 to 359, wherein said derivative modulates HER2 or HER2 mediated signalling via the same mechanism of action as Herceptin®.
[1560] 361. Derivative according to any of aspects 335 to 360, wherein said derivative modulates HER2 or HER2 mediated signalling via the same mechanism of action as Omnitarg.
[1561] 362. Derivative according to any of aspects 335 to 361, that can specifically bind to HER2 with a dissociation constant (K_{D}) of 10⁻⁵ to 10⁻¹² moles/litre or less, and preferably 10⁻⁷ to 10⁻¹² moles/litre or less and more preferably 10⁻⁸ to 10⁻¹² moles/litre.
[1562] 363. Derivative according to any of aspects 335 to 362, that can specifically bind to HER2 with a rate of association (kₒₙ-rate) of between 10² M⁻¹ s⁻¹ to about 10⁷ M⁻¹ s⁻¹, preferably between 10³ M⁻¹ s⁻¹ and 10⁷ M⁻¹ s⁻¹, more preferably between 10⁴ M⁻¹ s⁻¹ and 10⁷ M⁻¹ s⁻¹, such as between 10⁵ M⁻¹ s⁻¹ and 10⁷ M⁻¹ s⁻¹.
[1563] 364. Derivative according to any of aspects 335 to 363, that can specifically bind to HER2 with a rate of dissociation (k_{off} rate) between 1 s⁻¹ and 10⁻⁶ s⁻¹ preferably between 10⁻² s⁻¹ and 10⁻⁶ s⁻¹, more preferably between 10⁻³ s⁻¹ and 10⁻⁶ such as between 10⁻⁴ s⁻¹ and 10⁻⁶ s⁻¹.
[1564] 365. Derivative of a compound or construct according to any of aspects 151 to 234.
[1565] 366. Derivative according to aspect 365, that can specifically bind to HER2.
[1566] 367. Derivative according to aspect 366, wherein said derivative competes with Herceptin® for binding to HER2.
[1567] 368. Derivative according to any of aspects 366 or 367, wherein said derivative inhibits and/or blocks binding of Herceptin® to HER2.
[1568] 369. Derivative according to any of aspects 366 to 368, wherein said derivative is directed against the Herceptin® binding site on HER2.
[1569] 370. Derivative according to any of aspects 366 to 369, wherein said derivative specifically binds to domain IV of HER2.
[1570] 371. Derivative according to aspect 366, wherein said derivative competes with Omnitarg for binding to HER2.
[1571] 372. Derivative according to any of aspects 366 or 371, wherein said derivative inhibits and/or blocks binding of Omnitarg to HER2.
[1572] 373. Derivative according to any of aspects 371 or 372, wherein said derivative is directed against the Omnitarg binding site on HER2.
[1573] 374. Derivative according to any of aspects 371 to 373, wherein said derivative specifically binds to domain II of HER2.
[1574] 375. Derivative according to any of aspects 366 to 374, wherein said derivative competes with Herceptin® and Omnitarg for binding to HER2.
[1575] 376. Derivative according to any of aspects 366 to 375, wherein said derivative inhibits and/or blocks binding of Herceptin® and Omnitarg to HER2.
[1576] 377. Derivative according to any of aspects 366 to 376, wherein said derivative inhibits and/or blocks tumor cell proliferation.
[1577] 378. Derivative according to any of aspects 366 to 377, wherein said derivative inhibits, downregulates and/or blocks cell signalling.
[1578] 379. Derivative according to any of aspects 366 to 378, wherein said derivative induces apoptosis in tumor cells.
[1579] 380. Derivative according to any of aspects 366 to 379, wherein said derivative inhibits and/or blocks heterodimerization between ERBB receptors.
[1580] 381. Derivative according to any of aspects 366 to 380, wherein said derivative inhibits and/or blocks ligand activation of an ERbB hetero-oligomer comprising HER2 and HER3, HER4 or EGFR.
[1581] 382. Derivative according to any of aspects 366 to 381, wherein said derivative inhibits and/or blocks tumor vascularisation.
[1582] 383. Derivative according to any of aspects 366 to 382, wherein said derivative recruits immune effector cells such as macrophages and monocytes to the tumor.
[1583] 384. Derivative according to any of aspects 366 to 383, wherein said derivative inhibits and/or blocks TNF induced signalling and/or cell proliferation.
[1584] 385. Derivative according to any of aspects 366 to 384, wherein said derivative down-regulates HER2 levels and/or downregulates HER2-mediated signalling pathways.
[1585] 386. Derivative according to any of aspects 366 to 385, wherein said derivative inhibits and/or blocks metalloproteinase-mediated HER2 ectodomain shedding.
[1586] 387. Derivative according to any of aspects 366 to 386, wherein said derivative inhibits, downregulates and/or blocks ligand-mediated ErbB signalling.
[1587] 388. Derivative according to any of aspects 366 to 387, wherein said derivative inhibits and/or blocks HER2 ectodomain cleavage.
[1588] 389. Derivative according to any of aspects 366 to 388, wherein said derivative inhibits and/or blocks Heregulin-mediated activation of MAPK/Erk1/2.
[1589] 390. Derivative according to any of aspects 366 to 389, wherein said derivative inhibits and/or blocks PI3K/Akt signalling.
[1590] 391. Derivative according to any of aspects 366 to 390, wherein said derivative modulates HER2 or HER2 mediated signalling via the same mechanism of action as Herceptin®.
[1591] 392. Derivative according to any of aspects 366 to 391, wherein said derivative modulates HER2 or HER2 mediated signalling via the same mechanism of action as Omnitarg.
[1592] 393. Derivative according to any of aspects 366 to 392, that can specifically bind to HER2 with a dissociation constant (K_{D}) of 10⁻⁵ to 10⁻¹² moles/liter or less, and preferably 10⁻⁷ to 10⁻¹² moles/liter or less and more preferably 10⁻⁸ to 10⁻¹² moles/liter.
[1593] 394. Derivative according to any of aspects 366 to 393, that can specifically bind to HER2 with a rate of association (kₒₙ-rate) of between 10² M⁻¹ s⁻¹ to about 10⁷ M⁻¹ s⁻¹, preferably between 10³ M⁻¹ s⁻¹ and 10⁷M⁻¹ s⁻¹, more preferably between 10⁴ M⁻¹ s⁻¹ and 10⁷M⁻¹ s⁻¹, such as between 10⁵ M⁻¹ s⁻¹ and 10⁷ M⁻¹ s⁻¹.
[1594] 395. Derivative according to any of aspects 366 to 394, that can specifically bind to HER2 with a rate of dissociation (k_{off} rate) between 1 s⁻¹ and 10⁻⁶ s⁻¹ preferably between 10⁻² s⁻¹ and 10⁻⁶ s⁻¹, more preferably between 10⁻³ s⁻¹ and 10⁻⁶ s⁻¹, such as between 10⁻⁴ s⁻¹ and 10⁻⁶ s⁻¹.
[1595] 396. Derivative according to any of aspects 334 to 395, that has a serum half-life that is at least 1.5 times, preferably at least 2 times, such as at least 5 times, for example at least 10 times or more than 20 times, greater than the half-life of the corresponding amino acid sequence according to any of aspects 1 to 103 per se, Nanobody according to any of aspects 104 to 150 per se, or compound or construct according to any of aspects 151 to 234 per se.
[1596] 397. Derivative according to any of aspects 334 to 396, that has a serum half-life that is increased with more than 1 hours, preferably more than 2 hours, more preferably more than 6 hours, such as more than 12 hours, or even more than 24, 48 or 72 hours, compared to the corresponding amino acid sequence according to any of aspects 1 to 103 per se or Nanobody according to any of aspects 104 to 150 per se, respectively.
[1597] 398. Derivative according to any of aspects 334 to 397, that has a serum half-life in human of at least about 12 hours, preferably at least 24 hours, more preferably at least 48 hours, even more preferably at least 72 hours or more; for example, at least 5 days (such as about 5 to 10 days), preferably at least 9 days (such as about 9 to 14 days), more preferably at least about 10 days (such as about 10 to 15 days), or at least about 11 days (such as about 11 to 16 days), more preferably at least about 12 days (such as about 12 to 18 days or more), or more than 14 days (such as about 14 to 19 days).
[1598] 399. Derivative according to any of aspects 334 to 398, that is a pegylated derivative.
[1599] 400. Compound or construct, that comprises or essentially consists of one or more derivatives according to any of aspects 334 to 399, and optionally further comprises one or more other groups, residues, moieties or binding units, optionally linked via one or more linkers.
[1600] 401. Compound or construct according to aspect 400, in which said one or more other groups, residues, moieties or binding units are amino acid sequences.
[1601] 402. Compound or construct according to aspect 400, in which said one or more linkers, if present, are one or more amino acid sequences.
[1602] 403. Nucleic acid encoding a compound or construct according to any of aspects 400 to 402 that is such that it can be obtained by expression of a nucleic acid or nucleotide sequence encoding the same.
[1603] 404. Composition, comprising at least one derivative to any of aspects 334 to 399, compound or construct according to any of aspects 400 to 402, or nucleic acid or nucleotide sequence according to aspect 403.

### FIGURE LEGENDS

[1604] FIG. 1: Anti-HER2 humoral immune response induced after immunisation of Llama glama with HER2-overexpressing SKBR3 cells. The reactivity of pre-immune (day 0) and immune sera (day 42 and day of PBL1 take) of animals 121 and 122 immunized with whole cells was determined by ELISA using rhErbB2-Fc as antigen (see Example 3.2). A: total IgG response; B: IgG1 isotype response; C: IgG2 isotype response; D: IgG3 isotype response.

[1605] FIG. 2: HER2-specific ELISA analysis of periplasmic preparations containing myc-tagged Nanobody protein fragments from selected clones. Periplasmic preparations of soluble Nanobody protein fragments were added to wells of an ELISA plate, which had been coated with rhErbB2/Fc antigen and had been additionally blocked with PBS+1% casein. Detection was performed by a monoclonal anti-myc antibody followed by an alkaline phosphatase-conjugated polyclonal goat anti-mouse antibody. The ELISA was developed by a PNPP-substrate as described in Example 6. The OD-values (Y-axis) were measured at 405 nm by an ELISA-reader. Each bar represents an individual periplasmic extract.

[1606] FIG. 3: Flow cytometric analysis of selected clones (2A1, 2A4, 2C3, 2C5, 2D3 and 2G4). Nanobody-containing periplasmic extracts were added to ErbB2 overexpressing SKBR3 cells. Detection was performed by a monoclonal anti-myc antibody followed by a PE-labeled polyclonal anti-mouse antibody. Nanobodies binding to cells was measured by an increase in fluorescence intensity as compared to cells that were incubated with FACS buffer (PBS+10% FBS) followed by monoclonal anti-myc antibody and PE-labeled polyclonal anti-mouse antibody. Fluorescence intensity is blotted on the X-axis, the number of events on the Y-axis.

[1607] FIG. 4: Herceptin® competitive ELISA. An ELISA plate was coated with SKBR3 vesicles (5 μg/ml) and additionally blocked with PBS+1% casein. 2 nM Herceptin® was added to the wells, after which periplasmic preparations of soluble Nanobody protein fragments were added. Detection of Herceptin® binding to SKBR3 vesicles was performed by an alkaline phosphatase-conjugated AffiniPure Goat Anti-Human IgG, Fc Fragment Specific (Jackson ImmunoResearch Labs, Suffolk, UK). The ELISA was developed by a PNPP-substrate as described in Example 6. The OD-values (Y-axis) were measured at 405 nm by an ELISA-reader. Each bar represents an individual periplasmic extract. The OD value corresponding to the maximal signal represents the OD value measured for binding of Herceptin® without addition of periplasmic extract containing HER-binding Nanobody. The minimal signal represents the background staining of non-coated wells incubated only with alkaline phosphatase-conjugated AffiniPure Goat Anti-Human IgG, followed by detection using a PNPP-substrate. Controls 1-5 represent individual periplasmic extracts containing non-HER2 binding Nanobodies.

[1608] FIG. 5: Herceptin®-competitive FMAT. Dilutions of periplasmic extracts containing HER2 binding Nanobodies were tested for their ability to block the binding of Herceptin® to HER2-overexpressing SKBR3 cells as described in Example 8. (−) represents the signal obtained for binding of Alexa647-labeled Herceptin® without addition of periplasmic extract. Addition of periplasmic extract containing a non-HER2 binding Nanobody (irr) had no influence on the binding of Herceptin® to SKBR3 cells. Periplasmic extracts 2A4, 2A5, 2A6, 2B1, 2B2, 2B4, 2B5, 2C1, 2C3, 2D2 and 2D3 blocked binding of Herceptin® to HER2 with more than 80%.

[1609] FIG. 6: Herceptin®-competitive FMAT analysis. Nanobodies compete with binding of Herceptin® to SKBR3 cells in a dose-dependent manner as described in Example 8.

[1610] FIG. 7: Omnitarg-Fab competitive FMAT. Dilutions of periplasmic extracts containing HER2 binding Nanobodies were tested for their ability to block the binding of Omnitarg-Fab (OT-Fab) to HER2-overexpressing SKBR3 cells as described in Example 9. (cells) represents the signal obtained for binding of biotinylated OT-Fab without addition of periplasmic extract. Addition of periplasmic extract containing a non-HER2 binding Nanobody (irr) had no influence on the binding of OT-Fab to SKBR3 cells. Periplasmic extracts 47A8, 47A11, 47B1, 47B12, 47D1, 47D4, 47D5, 47E7, 47F5 and 47G7 blocked binding of OT-Fab to HER2 with more than 85%.

[1611] FIG. 8: Growth inhibitory effect of monovalent HER2 binding Nanobodies on ErbB2-overexpressing SKBR3 cells. SKBR3 cells were seeded in 96 well plates and allowed to adhere as explained in Example 11. HER2-binding Nanobodies 5F7, 2A5, 2A4, 2D3 and 2C3, non-HER2 binding irrelevant Nanobody 12B2 or medium alone were added and the cells were incubated for 3 days. During the last 24 h, cells were pulsed with 1 μCi [³H]-thymidine. Incorporation of [³H]-thymidine was measured as described in Example 11.

[1612] FIG. 9: Herceptin®-competitive FMAT. Dilutions of monovalent, bivalent and bispecific Nanobodies were tested for their ability to block the binding of Herceptin® to HER2-overexpressing SKBR3 cells as described in Example 12. Bispecific Nanobodies 2A4-9GS-ALB1 and 2A5-9GS-ALB1 blocked the binding of Herceptin® to HER2-expressing SKBR3 cells to the same extent as the monovalent 2A4 and 2A5 Nanobodies respectively. Bivalent 2A4-9GS-2A4 and 2A5-9GS-2A5 Nanobodies blocked the binding of Herceptin® to HER2-expressing SKBR3 cells to a greater extent than their monovalent format. A: 2A4 derivatives; B: 2A5 derivatives.

[1613] FIG. 10: Design of biparatopic Nanobody expression vector as described in Example 13.1.

[1614] FIG. 11: SKBR3 cell proliferation assay with biparatopic Nanobodies purified from periplasmic extracts derived from plate 27 by PhyTip200⁺. Biparatopic Nanobodies 27A2-35GS-2D3, 27A5-35GS-2D3, 27B3-35GS-2D3, 27B5-35GS-2D3, 27C4-35GS-2D3, 27D3-35GS-2D3 and 27D6-35GS-2D3 block SKBR3 cell proliferation to a greater extent than 50 nM Herceptin®. Biparatopic Nanobodies 27A7-35GS-2D3, 27A9-35GS-2D3, 27A11-35GS-2D3, 27A12-35GS-2D3, 27B11-35GS-2D3, 27C11-35GS-2D3 and 27D7-35GS-2D3 display an agonistic effect.

[1615] FIG. 12: Sensorgram of monovalent 2D3, bivalent 2D3-35GS-2D3 and dummy-2D3 biparatopic Nanobodies.

[1616] FIG. 13: Sensorgram of monovalent 2D3 and biparatopic Nanobodies 27B7-35GS-2D3, 27C3-35GS-2D3 and 27H5-350S-2D3.

[1617] FIG. 14: Sensorgram of monovalent 2D3, bivalent 2D3-35GS-2D3 and biparatopic Nanobodies 27A3-35GS-2D3, 27E7-35GS-2D3 and 27D1-35GS-2D3.

[1618] FIG. 15: Herceptin®-competitive FMAT. Dilutions of monovalent 2D3, bivalent 2D3-35GS-2D3 and biparatopic Nanobodies combining the Herceptin®-competitive 2D3 and a HER2-binding or dummy Nanobody were tested for their ability to block the binding of Herceptin® to HER2-overexpressing SKBR3 cells as described in Example 14.2. A: Bivalent 2D3-35GS-2D3 and biparatopic Nanobodies 27H3-35GS-2D3 and 27D1-35GS-2D3 block binding of Herceptin® to HER2 expressed on SKBR3 cells more efficiently than monovalent 2D3 Nanobody. B: Nanobodies 27A3, 27A5 and 30D10 have no influence on the Herceptin®-competitive behavior of Nanobody 2D3 when fused to its N-terminal end, spaced by a 35GS linker. C: Nanobodies 27B7, 27C3, 27H5 and the dummy Nanobody have an inhibitory effect on the Herceptin®-competitive potential of 2D3 when fused to its N-terminal end, spaced by a 35GS linker.

[1619] FIG. 16: Omnitarg-Fab competitive FMAT. Dilutions of OT-Fab, monovalent 2D3 and biparatopic Nanobodies 27C3-35GS-2D3, 27A5-35GS-2D3, 27H3-35GS-2D3 and dummy-35GS-2D3 were tested for their ability to block the binding of OT-Fab to HER2-overexpressing SKBR3 cells as described in Example 14.3. None of the bipartope Nanobodies, nor monovalent 2D3 blocked the binding of OT-Fab to HER2 expressed on SKBR3 cells. OT-Fab blocked binding of biotinylated OT-Fab in a dose-dependent manner.

[1620] FIG. 17: Effect of biparatopic Nanobodies on SKBR3 tumor cell proliferation. Biparatopic Nanobodies 27A5-35GS-2D3, 27A3-35GS-2D3 and 30D10-35GS-2D3 significantly block proliferation of SKBR3 tumor cells and to a greater extent than the monovalent 2D3 and dummy-2D3 biparatopic Nanobody.

[1621] FIG. 18: Effect of biparatopic Nanobodies on AKT signaling in SKBR3 cells (see Example 16). Biparatopic 27A3-35GS-2D3 and 27A5-35GS-2D3, Herceptin®, but not dummy-2D3 biparatopic or monovalent 2D3 Nanobody inhibits AKT phosphorylation in whole SKBR3 cell lysates.

[1622] FIG. 19: Sensorgram of HER2-ECD binding to 2D3, 47D5 or the biparatopic Nanobody 2D3-35GS-47D5.

[1623] FIG. 20: Effect of biparatopic Nanobodies combining Herceptin®-competitive and Omnitarg competitive Nanobodies, monovalent Nanobodies 2D3, 5F7 and 47D5, Omnitarg-Fab and Herceptin® on HRG-mediated activation of mitogen-activated protein kinase (MAPK).

[1624] FIG. 21: Effect of biparatopic Nanobodies combining Herceptin®-competitive and Omnitarg competitive Nanobodies, monovalent Nanobodies 2D3, 5F7 and 47D5, Omnitarg-Fab and Herceptin® on HRG-mediated activation of Akt signaling.

[1625] FIGS. 22A and 22B: Model of NB-2D3 (blue) linked to another Nanobody (cyan) docked on HER-2 (red). The linker is shown in black. N denotes the N-terminus of NB-2D3; C is the C-terminus of Nb-2D3.

[1626] FIG. 23: Energy penalty values for each residue in the linker +/−10 residues of each Nanobody connected to the linker in the biparatopic construct 5F7-35GS-47D5 with appropriate linker length. None of the residues of the linker or at the connection points of the linker with the Nanobodies (NB-1 and NB-2) have a high energy penalty value.

[1627] FIG. 24: Energy penalty values for each residue in the linker +/−10 residues of each Nanobody connected to the linker in the biparatopic construct 47D5-35GS-5F7 with unappropriate linker length. High energy penalty values are observed at the C-terminal connection of the linker with the N-terminal end of the second Nanobody (NB-2).

[1628] FIG. 25: Energy penalty values for each residue in the linker +/−10 residues of each Nanobody connected to the linker in a biparatopic construct with the same Nanobodies as in FIG. 23 but with a longer linker length (47D5-40GS-5F7). We see that the high energy penalty values at the connection of the C-terminal end of the linker with the N-terminal end of NB-2 are reduced suggesting a more appropriate linker length. The energy penalty values at both ends of the linker are still higher than those observed in FIG. 22, indicating a still not optimal linker.

[1629] FIG. 26A: Backbone RMSD (Å²) between the 5F7-linker-47D5 constructs (built by homology modelling) with the individual Nanobodies 5F7 and 47D5 in their unlinked binding mode. The linker length varies from 5 to 35.

[1630] FIG. 26B: Ribbon view of the 5F7-linker-47D5 biparatopic construct for 2 linker lengths. The binding mode of the individual Nanobodies is shown in blue; the biparatopic constructs are in red. The HER-2 target is omitted for clarity. On the left side: a 35GS linker is used between the 2 Nanobodies and a very limited deviation from the individual binding modes is observed. On the right side: a 5GS linker is used and it can clearly been observed that both Nanobodies in the biparatopic construct significantly deviate from their optimal binding mode.

[1631] FIGS. 27A-K: Figures illustrating some of the preferred aspects and some of the advantages of the present invention, including the multiparatopic polypeptides of the invention.

### EXAMPLES

### Example 1

### Procurement of the Extracellular Domain of HER2 for Use as Selection Antigen in Phage Display

[1632] 1.1 Cloning of Extracellular HER2 Domain cDNA was isolated from SKBR3 breast cancer cells. The isolation of total RNA and cDNA synthesis was done according to standard protocols (Sambrook, Molecular cloning: Laboratory manual, 2^{nd} edition, Cold Spring Harbor Laboratory Press, Cold Spring Harbor, N.Y. (1989)). The coding sequence of the extracellular domain of the HER2 antigen was amplified by PCR using primer For-ErbB2 ECD; GCGAGCACCCAAGTGTGCACC (SEQ ID NO: 2392) and primer Rev-ErbB2 ECD: CTGCTCGGCGGGGCAGCCCTT (SEQ ID NO: 2393). The PCR construct was then cloned into the pCR4-TOPO cloning vector (Invitrogen, Paisley, UK). Clone 4 having the correct sequence was then amplified by PCR using primers (For-pST ErbB2 ECD: GGCGCGCCGACTACAAAGACGATGACGACAAGAGCACCCAAGTGTGCACC (SEQ ID NO: 2394) and Rev-pST ErbB2 ECD: CGGCTCGAGCTATTAATGAGAATGGTGATGGTGCTCGGCGGGGCAGCCCTT (SEQ ID NO: 2395)) that were designed to introduce restriction sites at the beginning and the end of the fragment encoding the HER2-ECD. The PCR product was then cloned via AscI and XhoI into the plasmid pSecTag-HygroA (Invitrogen, Paisley, UK). As such, the coding sequence of the HER2-ECD was fused in frame with the Ig-κ chain leader sequence at its N-terminal end followed by a Flag tag and a polyhistidine tag at the C-terminus. The sequence of different clones was determined by sequencing according to standard protocols.

### 1.2 Expression of the Extracellular Domain of HER2 in HEK 293 Cells, Purification of the Recombinant Protein

[1633] Expression of the extracellular domain of HER2 was performed in HEK293T cells. HEK293T cells were seeded at 2×10⁶ cells in 20 ml Dulbecco's Modified Eagle's Medium (DMEM) containing 10% FBS in T75 tissue culture flasks and allowed to adhere overnight. The next day, culture supernatant was removed and the cells were transiently transfected with purified pSecTag-HygroA plasmid DNA using Fugene-HD (Roche, Basel, Switzerland) as transfection agent. Cells were grown for an additional 72 h in DMEM containing 0.1% FBS, after which the culture supernatant was collected and filter-sterilized on a 0.22 μm filter (Millipore). The construct was then further purified out of the culture supernatant by immobilized metal affinity chromatography (IMAC) and size exclusion chromatography (SEC).

[1634] Detection of the recombinant protein was performed by ELISA. Maxisorp 96-well plate (Nunc, Wiesbaden, Germany) was coated with an anti-flag monoclonal antibody (Sigma Aldrich, Bornem, Belgium). Unspecific binding was blocked with 2% milk powder in PBS for 2 hours. All prior and subsequent washes were performed with PBS. Afterward, eluate fractions were incubated for 2 hours at room temperature, followed by incubation with Herceptin®. Detection of the recombinant HER2-ECD was performed with a horseradish peroxidase conjugated anti-IgG antibody (Jackson Immunoresearch Laboratories, Suffolk, UK). Development of the ELISA was performed with TMB substrate (Pierce, Rockford, Ill.) according to the specifications of the manufacturer

### Example 2

### Procurement of Omnitarg-Fab for Use as Competitive Agent in Phage Display and Screening Assays

### 2.1 Cloning of Omnitarg-Fab

[1635] Omnitarg-Fab was constructed by gene assembly. The amino acid sequence of variable light and variable heavy chain of Omnitarg was derived from patents WO 2006/044908 and WO 2004/048525. The sequence was backtranslated and codon optimized using Leto 1.0 Gene optimization software (www.entechelon.com). Oligonucleotide primers for assembly of the variable light chain (V_{L}), variable heavy chain (V_{H}), constant light chain (C_{L}) and constant domain 1 of the heavy chain (CH₁) of the Omnitarg-Fab were designed (Tables C-5 and C-6) and assembly PCR performed. The introduced restriction sites SfiI and BsiWI for the V_{L}, KpnI and BstEII for the V_{H}, BsiWI and AscI for the C_{L}, and BstEII and NotI for the CH₁ were utilized for sequential cloning into an in-house expression vector derived from pUC119 which contained the LacZ promoter, a resistance gene for ampicillin or carbenicillin, a multicloning site and the gen3 leader sequence. In frame with the Omnitarg-Fab coding sequence, the vector coded for a C-terminal c-myc tag and a (His)6 tag. Oligonucleotide sequences were designed to have a 15 nucleotide overlap with 5′ and 3′ overlapping oligonucleotides. Three consecutive PCR overlap extension rounds were performed using Expand High fidelity PCR system (Roche, Basel, Switzerland) to obtain V_{L}, V_{H}, C_{L} and CH₁ respectively. The obtained PCR fragments were cloned into the pCR4-TOPO cloning vector (Invitrogen, Paisley, UK). Plasmid. DNA was prepared from clones having the correct sequence. The fragments were isolated from the pCR4-TOPO cloning vector via restriction with the appropriate enzymes and extraction of the fragments from agarose gel. The fragments were then consecutively cloned into the in-house expression vector.

2.2 Expression of the Omnitarg-Fab in E. coli Cells, Purification of the Recombinant Protein

[1636] The Omnitarg-Fab fragment was expressed in E. coli as His6-tagged protein and subsequently purified from the culture medium by immobilized metal affinity chromatography (IMAC) and size exclusion chromatography (SEC).

[1637] Omnitarg-Fab was biotinylated using EZ-Link Sulpho-NHS-LC-Biotin labeling kit according to the manufacturer's instructions (Pierce, Rockford, Ill.). Removal of free biotin was performed on Zeba Desalt Spin columns according to the manufacturer's instructions (Pierce, Rockford, Ill.).

### Example 3

### Identification of HER2 Binding Nanobodies

### 3.1 Immunizations

[1638] After approval of the Ethical Committee of the Faculty of Veterinary Medicine (University Ghent, Belgium), 2 llamas (121, 122) were immunized, according to standard protocols, with 6 intramuscular injections at biweekly intervals of SKBR3 human tumor cells which are derived from a breast tumor and contain an amplified HER2 gene and overexpress HER2 p185 tyrosine kinase (SKBR3; ATCC HTB-30; LGC Promochem, Middlesex, UK). Each dose consisted of approximately 5×10⁷ freshly harvested SKBR3 cells.

### 3.2 Evaluation of Induced Responses in Llama

[1639] At day 0, 42 and 81 (time of PBL collection), sera were collected to evaluate the induction of immune responses in the animals against HER2 by ELISA. In short, 2 μg/ml recombinant human ErbB2/Fc chimera (rhErb2-Fc; R&D Systems, Minneapolis, Minn.) were immobilized overnight at 4° C. in a 96 well Maxisorp plate (Nuns, Wiesbaden, Germany). Wells were blocked with a casein solution (1% in PBS). After addition of serum dilutions, specifically bound immunoglobulins were detected using a goat anti-llama horseradish peroxidase conjugate (Bethyl Lab. Inc., Montgomery, Tex.), showing that for all animals a significant antibody dependent immune response against HER2 was induced (FIG. 1A). The antibody response was mounted both by the conventional and the heavy chain only antibody expressing B-cell repertoires since specifically bound immunoglobulins could be detected with antibodies specifically recognizing the conventional llama IgG1 antibodies (FIG. 1B) or the heavy-chain only llama IgG2 (FIG. 1C) and IgG3 (FIG. 1D) antibodies.

### 3.3 Library Construction

[1640] When an appropriate immune response was induced in llama, four days after the last antigen injection, a 150 ml blood sample was collected and peripheral blood lymphocytes (PBLs) were purified by a density gradient centrifugation on Ficoll-Paque™ (Amersham Biosciences, Uppsala, Sweden) according to the manufacturer's instructions. Next, total RNA was extracted from these cells and used as starting material for RT-PCR to amplify Nanobody encoding gene fragments. These fragments were cloned into a phagemid vector derived from pUC119 which contained the LacZ promoter, a coliphage pill protein coding sequence, a resistance gene for ampicillin or carbenicillin, a multicloning site and the gen3 leader sequence. In frame with the Nanobody® coding sequence, the vector coded for a C-terminal c-myc tag and a (His)6 tag. Phage was prepared according to standard methods (see for example the prior art and applications filed by applicant cited herein) and stored after filter sterilization at 4° C. for further use.

### 3.4 Selections

[1641] Phage libraries obtained from llamas 121 and 122 were used for different selections.

[1642] In a first selection, ErbB2/Fc chimera (R&D Systems, Minneapolis, Minn., US) was coated onto Maxisorp 96-well plates (Nunc, Wiesbaden, Germany) at 20, 5 and 1 nM. Following incubation with the phage libraries and extensive washing, bound phage was aspecifically eluted with trypsin (1 mg/ml).

[1643] In a second selection, ErbB2/Fc chimera (R&D Systems, Minneapolis, US) was coated onto Maxisorp 96-well plates (Nunc, Wiesbaden, Germany) at 20 nM. Following incubation with the phage libraries and extensive washing, bound phage was specifically eluted with Herceptin® (Genentech, Roche).

[1644] In a third selection, soluble biotinylated ErbB2/Fc chimera was incubated with the phage libraries. After extensive washing, the biotinylated ErbB2/Fc was captured on a neutravidin coated solid phase. Bound phage was aspecifically eluted with trypsin (1 mg/ml).

[1645] In a fourth selection, soluble biotinylated ErbB2/Fc chimera was incubated with the phage libraries. After adding a 100-fold excess of non-labeled HER2, the biotinylated ErbB2/Fc was captured on a neutravidin coated solid phase. Bound phage was aspecifically eluted with trypsin (1 mg/ml).

[1646] In a fifth selection, phage libraries were incubated with Herceptin®-captured ErbB2/Fc. After extensive washing, bound phage was aspecifically eluted with trypsin (1 mg/ml)

[1647] In a sixth selection, soluble biotinylated ErbB2/Fc chimera was incubated with the phage libraries. After extensive washing, the biotinylated ErbB2/Fc was captured on a neutravidin coated solid phase. Bound phage was specifically eluted with Omnitarg-Fab.

[1648] In a seventh selection, phage libraries were incubated with Herceptin®-captured ErbB2/Fc. After extensive washing, bound phage was specifically eluted with Omnitarg-Fab.

[1649] In an eighth selection, phage libraries were incubated with biotinylated extracellular domain of HER2 captured on a neutravidin coated solid phase. After extensive washing, bound phage was specifically eluted with Omnitarg-Fab.

[1650] In a ninth selection, phage libraries were incubated with biotinylated extracellular domain of HER2 captured on a neutravidin coated solid phase. After extensive washing, bound phage was specifically eluted with Herceptin®.

[1651] In all selections, enrichment was observed. The output from each selection was recloned as a pool into an expression vector derived from pUC119 which contained the LacZ promoter, a resistance gene for ampicillin or carbenicillin, a multicloning site and the gen3 leader sequence. In frame with the Nanobody® coding sequence, the vector coded for a C-terminal c-myc tag and a (His)6 tag. Colonies were picked and grown in 96 deep-well plates (1 ml volume) and induced by adding IPTG for Nanobody expression. Periplasmic extracts (volume: ˜80 μl) were prepared according to standard methods (see for example the prior art and applications filed by applicant cited herein).

### Example 4

### Detection and Isolation of HER2-Specific Heavy Chain Antibody Producing B-Cells

[1652] PBMC were isolated from peripheral blood samples from llamas immunized with HER2-Fc or SKBR3 human tumor cells using Ficoll density gradient centrifugation. These were then resuspended in cell culture medium and partially depleted from monocytes by adherence to the surface of plastic tissue culture T-flasks.

[1653] Next, non-adherent PBMC were collected from the flasks, washed with FACS buffer (PBS/10% FCS) at 4° C. and resuspended in the same ice-cold buffer. These were then stained using a combination of Alexa 488 labeled HER2-Fc (produced in-house, using Invitrogen (Paisley, UK) activated Alexa 488 and HER2-Fc recombinant protein from R&D Systems (Minneapolis, Minn.)), phycoerythrin labeled mouse-anti-llama IgG2 and -3 monoclonal antibodies (produced in-house, using purified phycoerythrin from Cyanotech, (Kailua-Kona, Hi.) crosslinked using the sulfo-SMCC heterobifunctional linker from Pierce-Endogen (Rochford, Ill.) to in-house produced and purified monoclonal antibodies originally described in Daley et al. (Clin. Diagn. Lab. Immunol. 2005, 12: 380)), Alexa 647 labeled mouse-anti-llama IgG1 monoclonal antibody (produced in-house), Alexa 647 labeled mouse-anti-llama monocyte and neutrophil antibody DH59B (purified antibody obtained from VMRD Inc. (Pullman, Wash.)) and dead cell specific dye TOPRO3 (Invitrogen, Paisley, UK). In some experiments, in-house Alexa 647 labeled recombinant human IgG1 Fc fragment (R&D Systems, Minneapolis, Minn.) was added to the stain combination as well.

[1654] Stained samples were washed thoroughly using cold FACS buffer and analyzed on a standard two-laser BD FACSAria cell sorter equipped with the ACDU microtiter plate single-cell deposition option (BD Biosciences, Franklin Lakes, N.J.). During acquisition and analysis, a gate was set on lymphocytes based on their forward/side scatter profile, which overlaps considerably with monocytes in llama. Doublet events were eliminated from acquisition and analysis by forward as well as side scatter pulse processing, eliminating all events which might be originating from more than one cell. Dead cells, monocytes and B-cells expressing conventional antibody on their cell membrane were removed from further analysis by gating out all remaining events having fluorescence over background (unstained PBMC) in the Alexa647/TOPRO3 channel. In some experiments, Alexa 647 labeled recombinant Fc fragment was used to stain the PBMC additionally. In these experiments, B-cells producing antibody binding Fc were also rejected from analysis and sorting by similar Alexa 647 channel exclusion, so as to avoid isolation of B-cells binding the Fc region of the fusion protein. In the phycoerythrin channel. B-cells displaying heavy chain antibody on their cell membrane could be clearly differentiated from any other remaining lymphocyte-type cells, and another gate was set on this population. Lastly, antigen-binding heavy chain IgG expressing B-cells cells were detected as a discrete high fluorescence intensity peak population in the Alexa 488 channel histogram distinct from the main population being no more fluorescent in this channel than when no Alexa 488 labeled antigen was added. Individual antigen binding B-cells were collected in separate wells of 96-well PCR plates in the ACDU, using DiVa software predefined stringent single-cell sorting criteria to avoid any double-cell droplet or adjacent-droplet double cell sorting. Typically, only 1-5% of heavy chain B-cells were found to bind antigen.

### Example 5

### Amplification and Cloning of HER2-Specific Heavy Chain Antibody Variable Regions

[1655] Individual B-cells expressing heavy chain antibodies binding HER2-Fc or the HER2 region of the fusion protein specifically were sorted into 96-well plates containing 40 μl of RT-PCR buffer (Superscript III One-step RT-PCR kit, Invitrogen, Paisley, UK) per well, as described in Example 5, and stored at −80° C. For variable region gene sequence recovery, plates were thawed at room temperature and a mix of NP-40 (Roche Applied Sciences, Indianapolis, Ind.), gene specific 5′ and 3′ primers and RT-PCR enzyme mix were added to a total volume of 50 microliter per well by an automated liquid handler (Tecan, Männedorf, Switzerland). After reverse transcription and first PCR amplification in a standard thermal cycler, a 2 microliter aliquot was removed from all wells and amplified in a nested PCR reaction using a proof-reading thermostable polymerase, or blend of polymerases containing at least one proof-reading enzyme. The 5′ nested primer contains the nucleotide sequence required for directional TOPO cloning (Invitrogen, Paisley, UK). The 3′ primer is designed to allow for the in-frame fusion of variable region gene framework 4 to vector encoded detection (c-myc) and purification (6His) peptide tags. Amplicons were detected from individual wells using ethidium bromide stained agarose gels and/or in microtiter plates via PicoGreen DNA binding fluorescent dye assay (Invitrogen, Paisley, UK). Typically, up to 60% of wells contained a single and sharply defined amplification product, whereas control wells in the same plate not having received any cells were completely devoid of amplification product.

[1656] The amplicons from nested PCR wells containing detectable product were then ligated into an E. coli expression vector in a homogenous ligation reaction, by mixing an aliquot of unpurified PCR mix with a topoisomerase-activated expression vector (in-house developed IPTG inducible E. coli Nanobody expression vector, adapted to allow directional TOPO cloning by Invitrogen's custom services department). The ligation mixture was then pipetted onto electrocompetent E. coli cells pre-aliquotted in a 96-well format electroporation chamber array (BTX Products of Harvard Apparatus, Holliston, Mass.), and cells were transformed by electroporation using a BTX pulse generator.

[1657] Transformation mix was spread on selective agarose, multiple individual subcolonies picked and grown in 96-well deep well plates containing liquid selective medium by a QP Expression colony picker/rearrayer system (Genetix, New Milton, Hampshire, UK).

[1658] Periplasmic extracts (volume: ˜80 μl) were prepared according to standard methods (see for example the prior art and applications filed by applicant cited herein).

### Example 6

### Anti-HER2 Nanobodies Recognize Extracellular HER2 Domain

[1659] Periplasmic extracts of individual Nanobodies were screened for HER2 specificity by ELISA on solid phase coated ErbB2/Fc chimera (R&D Systems, Minneapolis, Minn.). Detection of Nanobody fragments bound to immobilized recombinant HER2 antigen was carried out using an in house made mouse anti-myc antibody (2 mg/ml) detected with alkaline phosphatase-conjugated anti-mouse IgG (Sigma Aldrich, Bornem, Belgium). The signal was developed by adding PNPP substrate solution and detected at a wavelength of 405 nm. FIG. 2 is illustrative of typical ELISA results, showing a high hit rate of positive clones.

[1660] Sequences of different HER2 binding clones are depicted in Tables B-1, B-2 and B-3. Alignment of the different HER2 binding clones based on CDR3 similarity is depicted in Table C-1.

### Example 7

### Anti-HER2 Nanobodies Recognize Cell Surface Exposed Receptor Epitopes

[1661] To verify whether the Nanobodies are able to recognize cell surface expressed HER2, binding to breast cancer tumor cell line SKBR3 was assessed by flow cytometry. Cell binding assays were carried out by initially incubating 200,000 cells with Nanobody-containing periplasmic preparation obtained in Examples 3 and 5 or relevant controls. After incubation, the cells were washed with FACS buffer. Cells were subsequently incubated successively with an in-house mouse anti-myc-tag monoclonal antibody and phycoerythrin labeled goat anti-mouse F(ab′)₂ fragments (Jackson ImmunoResearch, Suffolk, UK). To omit signals arising from dead cells, a TOPRO-3 (Invitrogen, Paisley, UK) staining was carried out. Cells were finally analyzed on a BD FACSArray Bioanalyzer System (BD Biosciences, Franklin Lakes, N.J., US).

[1662] FIG. 3 depicts binding of several Nanobody constructs to SKBR3 cells as measured by flow cytometric analysis. It can be seen that the constructs 2A1, 2A3, 2C3, 2C5, 2D3 and 2G4 show clearly discernable shifts in fluorescence intensity as compared to the fluorescence intensity for cells incubated only with FACS buffer in the absence of any construct but with all appropriate detection agents as used for the detection of Nanobody constructs.

### Example 8

### Screening for Nanobodies that Compete with Herceptin® for HER2 Binding

[1663] A competition ELISA was performed to screen for Nanobodies that are able to inhibit the Herceptin® interaction with HER2. In this competition ELISA, the binding of 2 nM Herceptin® to SKBR3 vesicles was evaluated in the presence of a 1/20 dilution of Nanobody containing periplasmic extract obtained in the second selection described in Example 3. FIG. 4 shows an example of this competitive ELISA, identifying several clones that compete with binding of Herceptin® to HER2 expressed on SKBR3 vesicles.

[1664] Periplasmic extracts obtained in the second and ninth selection described in Example 3 and periplasmic extracts obtained in Example 5, were also screened in a Herceptin®-competitive homogeneous cell-based assay to evaluate the capacity of the expressed Nanobodies to block Herceptin® binding to HER2. The FMAT 8200 HTS system (Applied Biosystems, Foster City, Calif.) assay was performed as follows: SKBR3 cells expressing HER2 were grown in tissue culture flasks, collected and washed with screening buffer (PBS, 10% FCS) and resuspended in screening buffer at a concentration of 2.5×10⁵ cells/ml. Alexa 647-labeled Herceptin® was diluted to 62.5 ng/ml in screening buffer. Periplasmic extracts were diluted in screening buffer to obtain final dilutions of 4, 10, 40, 100, 200 and 400. To initiate the competitive screen, 10 μl labeled Herceptin®, 10 μl periplasmic dilution and 20 μl of cells were added to each well of FMAT system 384-well plates (PE Biosystems, Foster City, Calif.) The plates were scanned after 2 hours of incubation. A well was considered positive if it had a count of over 50 events. Screening of the extracts in this Herceptin® competitive homogeneous cell-based assay identified several clones (SEQ ID NOs: 2051-2113) that can block the binding of Herceptin® to HER2 with more than 90% (FIG. 5).

[1665] Purified Nanobodies were tested for inhibition of binding of Alexa647-labeled Herceptin® to HER2 expressed on SKBR3 cells. Serial dilutions of purified Nanobody (concentration range: 20 nM-10 pM) were added to SKBR3 cells together with 4×10⁻¹⁰M Alexa647-labeled Herceptin® and incubated for 2 hours, after which plates were scanned. Herceptin® was included as reference (MoAb). Results are shown in FIG. 6. Dose-response curves were observed for all Nanobodies with IC₅₀-values ranging from 40 pM to 200 pM.

### Example 9

### Screening for Nanobodies that Compete with Omnitarg-Fab for HER2 Binding

[1666] Periplasmic extracts obtained in the sixth and seventh selection described in Example 3, were screened in an Omnitarg-Fab (OT-Fab) competitive homogeneous cell-based assay to evaluate the capacity of the expressed Nanobodies to block OT-Fab binding to HER2. The FMAT 8200 HTS system (Applied Biosystems, Foster City, Calif.) assay was performed as follows: SKBR3 cells expressing HER2 were grown in tissue culture flasks, collected and washed with screening buffer (PBS, 10% FCS) and resuspended in screening buffer at a concentration of 2.5×10⁵ cells/ml. Biotinylated OT-Fab was diluted in screening buffer to obtain a final concentration of 0.586 nM. The periplasmic extracts were diluted in screening buffer to obtain final dilutions of 100. To initiate the competitive screen, 5 μl labeled OT-Fab, 10 μl periplasmic dilution, 5 μl. FMAT Blue dye-labeled streptavidin (100 ng/ml) and 20 μl of cells were added to each well of FMAT system 384-well plates (PE Biosystems, Foster City, Calif.). The plates were scanned after 2 hours of incubation. A well was considered positive if it had a count of over 50 events. Screening of the extracts in this OT-Fab competitive homogeneous cell-based assay identified clones that can block the binding of OT-Fab to HER2 with more than >90% (FIG. 7). Sequence analysis showed that all clones that blocked binding of OT-Fab HER2 are identical and represent a single Nanobody (SEQ ID NO: 2114).

### Example 10

### Screening of Kinetic Off-Rate Constants Via Surface Plasmon Resonance (BIAcore)

[1667] RhErbB2-Fc was immobilized on a CM5 sensor chip surface docked in Biacore 3000. Approximately 3600RU of rhErbB2-Fc was immobilized. Experiments were performed at 25° C. Periplasmic extracts were diluted 10-fold in running buffer (HBS-EP). The samples were injected for 1 min at a flow rate of 45 μl/min over the activated and reference surfaces. Those surfaces were regenerated with a 3 s pulse of glycine-HCl μl-11.5+0.1% P20. As an example, the off rate (k_{off}) of different Nanobodies is documented in Table C-2.

### Example 11

### Anti-HER2 Nanobodies can Block SKBR3 Cell Proliferation

[1668] The growth inhibitory characteristics of isolated Nanobodies were evaluated using the breast tumor cell line SKBR3. Briefly, SKBR3 cells were detached using 0.25% (vol/vol) trypsin and suspended in Dulbecco's Modified Eagle's Medium (DMEM) supplemented with 10% fetal calf serum (FCS), glutamine, and penicillin-streptomycin at a density of 1×10⁵ cells/ml. Aliquots of 200 μl (2×10⁴ cells) were plated into 96-well microdilution plates and allowed to adhere. After overnight adherence, cells were washed with serum-free medium and starved for 4 hours in 100 μl serum-free medium. Then, 100 μl of 1% FCS containing medium alone or medium containing Nanobody (final concentration of 50 nM) was added. After 2 days of incubation, cells were pulsed with 1 μCi [³H]-thymidine and incubated for an additional 24 h prior to freezing at −80° C. Cells were subsequently thawed and embedded on glass fiber membranes using a cell harvester (Perkin Elmer Life Sciences, Wellesley, Mass., USA). After several washings with water, filters were air-dried and counted using a γ-counter (Perkin Elmer Life Sciences). Nanobody 2A5 inhibited SKBR3 proliferation by about 18%. Up to 30% or more inhibition was achieved with Nanobodies 2C3, 2D3, 2A4 and 5F7 (FIG. 8).

### Example 12

### Generation of Multivalent/Multispecific Nanobody Formats

[1669] To potentially increase the biological effect of Nanobody molecules, bivalent constructs were fused head-to-tail using a GGGGSGGGS linker.

[1670] Here we describe the construction and characterization of bivalent Nanobodies consisting of two identical anti-HER2 molecules all separated by a 9 (GS) amino acid linker peptide. DNA segments encoding Nanobodies 2A4, 2A5, 2C3, 2D3, 5F7 were head-to-tail fused resulting in constructs 2A4-9GS-2A4, 2A5-9GS-2A5, 2C₃₋₉GS-2C3, 2D3-9GS-2D3, 5F7-9GS-5F7. Sequences of these bivalent constructs are listed in Table B-4. All Nanobodies were expressed in E. coli and purified according to standard protocols (see for example the prior art and applications filed by applicant cited herein).

[1671] The different bivalent Nanobody formats were screened in a Herceptin®-competitive homogeneous cell-based assay to evaluate their capacity to block Herceptin® binding to HER2 compared to their monovalent format. Briefly, 10 μl labeled Herceptin® (62.5 ng/ml), 10 μl Nanobody dilution and 20 μl of cells (5×10³ cells) were added to each well of FMAT system 384-well plates (PE Biosystems, Foster City, Calif.). The plates were scanned after 2 hours of incubation. FIG. 9 shows that the bivalent constructs are more efficient in blocking the binding of Herceptin® to HER2-expressing SKBR3 cells as compared to their monovalent formats.

[1672] To test whether selected Nanobodies have potential as anticancer agents in an animal model, a strategy to increase the serum half life is preferred (as for example described in patent application WO 04/041865), since the serum half life of a mono- or bivalent Nanobody (approximately 15 or 30 KDa, respectively) is not optimal for this therapeutic indication. Human serum albumin specific Nanobody ALB1 (SEQ ID NO: 2391), cross reactive with mouse serum albumin, was chosen. Here we describe the construction of bispecific Nanobodies consisting an anti-HER2 Nanobody and ALB1, all separated by a 9 (GS) amino acid linker peptide and resulting in constructs 2A4-9GS-ALB1, 2A5-9GS-ALB1, 2C3-9GS-ALB1, 2D3-9GS-ALB1 and 5F7-9GS-ALB1. Sequences of these bispecific constructs are given in Table B-5.

[1673] To test whether the HER2-binding Nanobodies as disclosed herein above retain their biological activity in a more complicated molecular context such as a bispecific format, Nanobody formats were screened in a Herceptin®-competitive homogeneous cell-based assay to evaluate their capacity to block Herceptin® binding to HER2 compared to their monovalent and bivalent format. Based on the results shown in FIG. 9, it can be concluded that fusion of a Nanobody with different antigen specificity to a HER2-binding Nanobody does not affect the potency of the latter.

### Example 13

### Generation of Biparatopic Formats Combining a Herceptin®-Competing Nanobody with a Library of HER2 Binding Nanobodies

[1674] The structural requirement for multispecificity is to fuse two or more binding domains together, with sufficient flexibility to allow simultaneous binding to different target epitopes. The simplest bispecific is one that binds to two different and non-overlapping epitopes on the same target in such a way that simultaneous binding to the target is possible. Robert et al (Int. J. Cancer 1995, 28; 62(3): 283-90) have described the design of high avidity biparatopic antibodies directed against two different epitopes of the carcinoembryonic antigen. Binding of both arms simultaneously without a significant loss of entropy will endow ‘biparatopic’ antibodies with increased avidity and hence, increased binding affinity to the target. As a result, higher potency can be obtained as well as enhanced selectivity. In addition, careful selection of the epitopes targeted on the antigen by the biparatopic antibody or fragment thereof, combined with rational design of linkers to allow maximal flexibility of the two binding domains within the biparatopic antibody, may for example result in the blocking of two or more critical interaction sites of the target, leading to improved potency.

[1675] Using genetic fusion, one Herceptin®-competing Nanobody was combined with a repertoire of HER2-binding Nanobodies and this mini-repertoire was screened for biparatopics with improved binding activity and tumor cell growth inhibitory characteristics compared to the monovalent Herceptin®-competing Nanobody.

### 13.1 Construction of an Expression Vector for Biparatopic Design

[1676] For the construction of biparatope Nanobodies, an expression vector was adapted to contain the Herceptin®-competitive Nanobody 2D3 (which was shown to block cell proliferation between 20-30% as monovalent format (see Example 11) and which strongly competes with Herceptin® for binding to HER2-overexpressing SKBR3 cells) to which other Nanobodies with different HER2-binding specificities can be fused, spaced by a linker (FIG. 10). For the design of this vector, a 35 GS linker was used but other linker lengths can also be used to allow flexibility between the two building blocks. The 2D3 Nanobody is placed at the C-terminal end of the construct to allow SfiI-BstEII cloning of a full selection output. Alternatively, the 2D3 Nanobody can also be placed at the N-terminal end of the construct to allow cloning of a full selection output at the C-terminal end.

### 13.2 Generation of a Biparatopic Library

[1677] A full selection output retrieved from a selection on Herceptin®-captured rhErbB2/Fc followed by trypsin elution (Example 3.4), was unidirectionally cloned to the 2D3 Nanobody. Sequence analysis of a selected number of individual colonies derived from the selection output showed a good diversity in the repertoire: 16 Nanobody families were identified in 72 sequences. The ligation mix was transformed into E. coli cells and the transformation mix spread on selective agarose. Multiple individual subcolonies were picked and grown in 96-well deep well plates containing liquid selective medium by a QP Expression colony picker/rearrayer system (Genetix, New Milton, Hampshire, UK). Forty-eight individual colonies were sequenced and analyzed. From 32 annotated sequenced, eight different Nanobody families were identified.

[1678] Periplasmic extracts (volume: ˜80 μl) were prepared according to standard methods (see for example the prior art and applications filed by applicant cited herein). The biparatopic Nanobodies were purified from the periplasmic extracts using PhyTip200⁺ columns (Phynexus, San Jose, Calif.) by a Tecan Evo Robotic system (Promega, Madison, US) and analyzed for their effects on SKBR3 tumor cell proliferation.

### 13.3 Effect of Biparatopic Nanobodies on SKBR3 Cell Proliferation

[1679] The growth inhibitory characteristics of Nanobodies purified from periplasmic extracts by PhyTip200⁺ were evaluated using the breast tumor cell line SKBR3. Briefly, SKBR3 cells were detached using 0.25% (vol/vol) trypsin and suspended in DMEM supplemented with 10% fetal calf serum (FCS), glutamine, and penicillin-streptomycin at a density of 1×10⁵ cells/ml. Aliquots of 200 μl (2×10⁴ cells) were plated into 96-well microdilution plates and allowed to adhere. After overnight adherence, cells were washed with serum-free medium and starved for 4 hours in 100 μl serum-free medium. Then, 100 μl of 1% FCS containing medium alone or 90 ml of 1% FCS containing medium with 10 μl PhyTip200⁺ purified periplasmic extract or 50 nM Herceptin® was added. After 2 days of incubation, cells were pulsed with 1 μCi [³H]-thymidine and incubated for an additional 24 h prior to freezing at −80° C. Cells were subsequently thawed and embedded on glass fiber membranes using a cell harvester (Perkin Elmer Life Sciences, Wellesley, Mass., USA). After several washings with water, filters were air-dried and counted using a ₇-counter (Perkin Elmer Life Sciences).

[1680] Herceptin® was able to inhibit cell proliferation of SKBR3 up to 50%. Different subclasses of biparatopic Nanobodies were identified: a group of biparatopic Nanobodies revealed an inhibitory effect on the ErbB2 overexpressing cell line SKBR3 to a lower extent than Herceptin®, a second group of biparatopic Nanobodies increased cell proliferation and a third group of biparatopic Nanobodies was able to inhibit cell proliferation of SKBR3 cells to an equal or greater extent than Herceptin®. FIG. 11 shows an example of this ‘single hit’ cell proliferation assay.

### Example 14

### Characterization of Biparatopic Nanobodies

[1681] The biparatopic molecules 28F6-35GS-2D3, 28G5-35GS-2D3, 29E9-35GS-2D3, 30D10-35GS-2D3, 27A5-35GS-2D3, 31D11-35GS-2D3, 30E10-35GS-2D3, 27A3-35GS-2D3, 27B7-35GS-2D3, 27C3-35GS-2D3, 27D1-35GS-2D3, 27E4-35GS-2D3, 27E7-35GS-2D3, 27H3-35GS-2D3, 27H4-35GS-2D3, 27H5-35GS-2D3 were expressed in E. coli as c-myc, His6-tagged proteins and subsequently purified from the culture medium by immobilized metal affinity chromatography (IMAC) and size exclusion chromatography (SEC). A control biparatopic Nanobody consisting of a dummy (i.e. not binding to HER2) Nanobody genetically fused to the 2D3 Nanobody, spaced by a 35GS linker was used as a control.

### 14.1 Biparatopic Nanobodies Display Improved Binding to HER2 as Compared to the Monovalent Building Blocks

[1682] The off-rate of the biparatopic Nanobodies was determined by surface plasmon resonance on a Biacore 3000 instrument. In brief, rhErbB2-Fc was immobilized on a CM5 sensor chip surface docked in Biacore 3000. Approximately 3600RU of rhErb B2-Fc was immobilized. Experiments were performed at 25° C. Nanobody binding was assessed at various concentrations. The samples were injected for 1 min at a flow rate of 45 μl/min over the activated and reference surfaces to allow for binding to chip-hound antigen. Next, binding buffer without Nanobody was sent over the chip at the same flow rate to allow for dissociation of bound Nanobody. After 10 min, remaining bound analyte was removed by injecting regeneration solution (Glycine/HCl pH1.5).

[1683] The monovalent 2D3 and biparatopic dummy-2D3 Nanobodies had similar off-rates in the range of 1E-3 l/s, indicating that fusion of a Nanobody to the N-terminal end of 2D3 does not interfere with binding of the latter (FIG. 12). The off-rate of bivalent 2D3-35GS-2D3 is in the range of 1E-4 l/s, indicating simultaneous binding of the two Nanobodies.

[1684] The off-rate of the biparatopic constructs 2B7-350S-2D3, 27C3-35GS-2D3 and 27H5-35GS-2D3 are in the range of 1E-3 l/s (FIG. 13). These off-rates and the binding responses indicate binding by the 2D3 paratope, but lack of binding by the other paratope, either by non-specificity for rhErb2 or an extremely much lower affinity for rhErb2 compared to 2D3 or by sterical hindrance of the epitope by the Fc part or by the altered conformation after the immobilization procedure on the CM5 sensor chip.

[1685] Off-rates of the biparatopic constructs 2D3-35GS-2D3, 27D1-35GS-2D3, 27A3-35GS-2D3, 27E7-35GS-2D3 are in the range of 1E-4 l/s (FIG. 14). These off-rates indicate simultaneous binding of the 2 paratopes.

### 14.2 Herceptin®-Competitive Behavior of Biparatopic Nanobodies

[1686] Biparatopic Nanobodies were screened in a Herceptin®-competitive homogeneous cell-based assay to evaluate the capacity of the expressed Nanobodies to block Herceptin® binding to HER2. The FMAT 8200 HTS system (Applied Biosystems, Foster City, Calif.) was used as described in Example 8. Bivalent 2D3-35GS-2D3 Nanobody more efficiently blocks binding of Herceptin® to HER2 as compared to monovalent 2D3 (FIGS. 15A and B). Likewise, biparatopic Nanobodies 27H3-35GS-2D3 and 27D1-35GS-2D3 block binding of Herceptin® to HER2 expressed on SKBR3 cells more efficiently than monovalent 2D3. Nanobodies 27A3, 27A5 and 30D10 have no influence on the Herceptin®-competitive characteristic of Nanobody 2D3 when fused to its N-terminal end, spaced by a 35GS linker (FIG. 15B). Finally, Nanobodies 27B7, 27C3, 27H5 and the dummy Nanobody have an inhibitory effect on the Herceptin®-competitive potential of 2D3 (FIG. 15C).

14.3 Competitive Binding of Biparatopic Nanobodies with Omnitarg-Fab to HER2.

[1687] Biparatopic Nanobodies were screened in an Omnitarg-Fab competitive homogeneous cell-based assay to evaluate the capacity of the expressed Nanobodies to block Omnitarg-Fab binding to HER2. The FMAT 8200 HTS system (Applied Biosystems, Foster City, Calif.) was used as described in Example 9. Biparatopic Nanobodies 2D3-35GS-2D3, 27H3-35GS-2D3, 27D1-35GS-2D3, 27A3-35GS-2D3, 27A5-35GS-2D3 and 30D10-35GS-2D3 did not efficiently block the binding of biotinylated Omnitarg Fab (FIG. 16). Non-labeled Omnitarg-Fab inhibited binding of biotinylated Omnitarg-Fab in a dose-dependent manner.

### Example 15

### Biparatopic Nanobodies Comprising a Herceptin®-Competitive and a HER2-Binding Nanobodies Inhibit SKBR3 Cell Proliferation

[1688] The growth inhibitory characteristics of biparatopic Nanobodies were evaluated using the breast tumor cell line SKBR3. Briefly, SKBR3 cells were detached using 0.25% (vol/vol) trypsin and suspended in DMEM supplemented with 10% fetal calf serum (FCS), glutamine, and penicillin-streptomycin at a density of 1×10⁵ cells/ml. Aliquots of 200 μl (2×10⁴ cells) were plated into 96-well microdilution plates and allowed to adhere. After overnight adherence, cells were washed with serum-free medium and starved for 4 hours in 100 μl serum-free medium. Then, 100 μl of 1% FCS containing medium alone or 90 μl of 1% FCS containing medium with serial dilutions of IMAC/SEC purified biparatopic Nanobodies, monovalent 2D3 or 50 nM Herceptin® was added. After 2 days of incubation, cells were pulsed with 1 μCi [³H]-thymidine and incubated for an additional 24 h prior to freezing at −80° C. Cells were subsequently thawed and embedded on glass fiber membranes using a cell harvester (Perkin Elmer Life Sciences, Wellesley, Mass., USA). After several washings with water, filters were air-dried and counted using a γ-counter (Perkin Elmer Life Sciences).

[1689] Biparatopic Nanobodies are able to inhibit cell proliferation of SKBR3 cells to an equal or greater extent than Herceptin®. FIG. 17 shows an example of this cell proliferation assay.

### Example 16

### Biparatopic Nanobodies Comprising a Herceptin®-Competitive and a HER2-Binding Nanobody Inhibit AKT Signal Transduction in SKBR3 Breast Cancer Cells

[1690] Upon overexpression, HER2 may be activated by homodimerisation. HER2 plays a major regulatory role in the signalling network involved in many cellular processes, including the p21Ras/Mitogen-Activated Protein Kinase (MAPK) and PI3K/AKT pathways. Treatment of HER2 overexpressing SKBR3 cells with Herceptin® results in reduction in HER2 phosphorylation which is linked to inhibition of AKT phosphorylation.

[1691] To assess the effect of biparatopic Nanobodies on the AKT pathway in SKBR3 cells, cells were plated in 2% serum containing medium in 24-well culture plates. The next day, medium was refreshed and 50 nM of either biparatopic Nanobody. Herceptin®, monovalent 2D3 Nanobody or medium alone was added and incubated for 16 h. The reaction was stopped by aspirating the cell medium. Cells were lysed by addition of lysis buffer (20 mM NP40, 20 mM Tris-HCl pH8, 10% glycerol, 2 mM EDTA, 1 mM sodium orthovanadate, complete protease inhibitor cocktail, 1% PBS). Protein concentration in the lysates was measured using BCA protein assay kit (Pierce) according to the manufacturer's indications. Equal amounts of protein were run on 10% polyacrylamide gels and electroblotted onto Invitrolon PVDF membranes (Invitrogen, Paisley, UK). The presence of phosphorylated AKT was assessed by probing the blots with Phospho-AKT (Ser473) antibody (Cell Signaling, Danvers, Mass.) and total AKT was detected using AKT antibody (Cell Signaling). The blots were visualized using a chemiluminescent substrate (Perkin Elmer, Wellesley, Mass., USA).

[1692] As shown in FIG. 18, biparatopic Nanobodies 27A5-35GS-2D3 and 27A3-35GS-2D3 significantly block AKT activation in SKBR3 cells, whereas dummy-2D3 biparatopic and monovalent 2D3 Nanobody do not have a visible effect on AKT signalling.

### Example 17

### Construction of Biparatopic Nanobodies Combining Herceptin®- and Omnitarg Competitive Nanobodies

[1693] For the construction of biparatopics consisting of a Herceptin®-competitive and Omnitarg-competitive Nanobody, the expression vector described in Example 13.1 was used. Herceptin®-competitive Nanobodies 2D3 and 5F7 were cloned either at the C-terminal or N-terminal end of Omnitarg-competitive Nanobody 47D5, spaced by a 35GS linker. Biparatopic Nanobodies 2D3-35GS-47D5, 47D5-35GS-2D3, 5F7-35GS-47D5 and 47D5-35GS-5F7 were expressed in E. coli as c-myc, His6-tagged proteins and subsequently purified from the culture medium by immobilized metal affinity chromatography (IMAC) and size exclusion chromatography (SEC). Two control biparatopic Nanobody consisting of a dummy Nanobody genetically fused to the 2D3 or 47D5 Nanobody, spaced by a 35GS linker were used as controls.

### Example 18

### Characterization of Biparatopic Formats Combining Herceptin®- and Omnitarg Competitive Nanobodies

### 18.1 Biacore Analysis

[1694] A kinetic analysis for 2D3, 5F7 and 47D5 was performed on Biacore to determine the binding affinity to HER2. In addition, the influence of a dummy Nanobody fused to the N-terminal end of 2D3 and 47D5 on the binding characteristics of the latter to HER2, was analyzed. rhErbB2-Fc was immobilized on a CM5 sensor chip surface docked in T100. Approximately 3600RU of rhErbB2-Fc was immobilized. Experiments were performed at 25° C. Different concentrations of Nanobody (100 nM-0.78 nM) were made in running buffer (HBS-EP). The samples were injected for 1 min at a flow rate of 45 μl/min over the activated and reference surfaces.

[1695] In Table 2 an overview of k_{d}/k_{off}, kₐ, and K_{d} values for the Nanobodies is shown. Fusion of a Nanobody at the N-terminal end of the Nanobodies 2D3 and 47D5 does not significantly alter the binding characteristics of these Nanobodies to HER2.

[1696] The binding of the biparatopic 2D3-35GS-47D5 to HER2 was compared to the binding of the monovalent building blocks 2D3 and 47D5. Hereto, approximately 90 RU of the respective Nanobodies were immobilized and different concentrations (100-1000 nM) HER2-ECD was injected. As shown in Table C-4, the off-rate of the HER2-ECD from the 2D3-47D5 surface was 25× lower than the off-rate on each of the 2D3 and 47D5 surfaces, indicating an avidity effect caused by binding of HER2-ECD on both the 2D3 and 47D5 Nanobodies simultaneously (FIG. 19).

### 18.2 Biparatopic Nanobodies Combining Herceptin®- and Omnitarg Competitive Nanobodies Inhibit Heregulin-Mediated HER2-HER3 Signaling

[1697] After ligand-binding, the HER receptors become activated by receptor dimerization between either two identical receptors (homodimerization) or different receptors of the same family (heterodimerization). After receptor dimerization, activation of the intrinsic protein kinase activity and tyrosine autophosphorylation occurs, recruiting and phosphorylating several intracellular substrates involving the Ras-Raf-MAPK, the PI3K/Akt, and other signaling pathways that regulate multiple biological processes including apoptosis and cellular proliferation. The mitogen-activated protein kinases (Erk1/Erk2) are one of the key endpoints in signal transduction pathways that ultimately trigger cancer cells to divide.

[1698] The ability of the biparatopic Nanobodies combining Herceptin® and Omnitarg-competitive Nanobodies to inhibit heregulin (HRG) activation of MAPK-Erk1/Erk2 was assessed in the following way. MCF7 cells (5×10⁴/well) were plated in serum-containing media in 24-well culture plates. The next day, media were removed and fresh media containing 0.1 serum were added to each well. The next day, prior to the assay, the media were replaced with serum-free medium. Cells were then incubated for 30 min with 50 nM of biparatopic Nanobody 2D3-35GS-47D5, 47D5-35GS-2D3, 5F7-35GS-47D5 or 47D5-35GS-5F7, monovalent 2D3, 5F7 or 47D5, Omnitarg-Fab or Herceptin®. Cells were then treated with 0.2 nM HRG for 15 min. The reaction was stopped by aspirating the cell medium. Cells were lysed by addition of lysis buffer (20 mM NP40, 20 mM Tris-HCl pH8, 10% glycerol, 2 mM EDTA, 1 mM sodium orthovanadate, complete protease inhibitor cocktail, 1% PBS). Protein concentration in the lysates was measured using BCA protein assay kit (Pierce) according to the manufacturer's indications. Equal amounts of protein were run on 10% polyacrylamide gels and electroblotted onto Invitrolon PVDF membranes (Invitrogen, Paisley, UK). The presence of phosphorylated Erk1/Erk2 (p44/42 MAPK) was assessed by probing the blots with phosphor-p44/42 MAPK (Thr202/Tyr204) antibody (Cell Signaling, Danvers, Mass.) and total MAPK was detected using p44/42 MAP kinase (137F5) rabbit mAb (Cell Signaling). The blots were visualized using a chemiluminescent substrate (Perkin Elmer, Wellesley, Mass., USA).

[1699] As shown in FIG. 20, biparatopic Nanobodies 2D3-35GS-47D5 and 5F7-35GS-47D5 significantly block HRG-mediated activation of MAPK to a greater extent than Omnitarg-Fab and Herceptin®, Surprisingly, when the Omnitarg-competing Nanobody 47D5 comprised the N-terminal Nanobody in the biparatopic constructs, i.e. 47D5-35GS-2D3 and 47D5-35GS-5F7, no significant reduction in MAPK activation could be observed. Monovalent Nanobodies 2D3, 5F7 and 47D5 could not block HRG-mediated MAPK activation in MCF-7 cells.

[1700] These data suggest that the position of the Nanobodies within the biparatopic Nanobody greatly influences the potency of the molecule. In addition, the length of the linker used to genetically fuse 2 Nanobodies biparatopic may be critically important to provide maximal flexibility between the 2 Nanobodies to allow tight binding to their respective binding epitope on HER2.

[1701] Biparatopic Nanobodies 2D3-35GS-47D5 and 5F7-35GS-47D5 were also shown to inhibit heregulin (HRG)-dependent Akt activation (FIG. 21). Activation of the PI3K signal transduction pathway is important for cell survival. Complexes formed between HER2 and either HER3 or EGFR can initiate these pathways in response to HRG. Incubation of MCF7 breast cancer cells with biparatopic Nanobodies 2D3-35GS-47D5 or 5F7-35GS-47D5 inhibited HRG-mediated. Akt activation to a greater extent than Omnitarg-Fab or Herceptin®. These data suggest that the biparatopic Nanobodies 2D3-35GS-47D5 or 5F7-35GS-47D5 may inhibit HER2 ligand-activation of P13 kinase and that this inhibition may lead to apoptosis.

### Example 19

### In-Silico Design of Optimal Linker Lengths in Biparatopic Nanobody Formats

[1702] In-silico design of optimal linker lengths for a biparatopic Nanobody format may for example be performed as follows. The 3-dimensional (3D) coordinates of the binding mode of each individual Nanobody to its respective epitope on the target are determined, for example from:
[1703] a. a structure of the Nanobody-target complex determined by X-ray experiments or NMR experiments.
[1704] b. a docking model of each Nanobody binding on their respective epitope on the target. Also a number of potential binding modes of each Nanobody to the target derived from docking studies can be used. Docking can be done by e.g. ZDock (Chen and Weng 2002, Proteins 47(3): 281-294; Chen and Weng 2003, Proteins 51(3): 397-408; Chen et al. 2003, Proteins 52(1): 80-87) and refined by RDock (Li et al. 2003, Proteins 53(3): 693-707) or by other methods (Fernandez-Recio et al. 2003, Proteins 52(1): 113-117).
[1705] c. Binding mode of each Nanobody can be extracted from the same structure or from separate complexes. In the latter case, the binding modes of each Nanobody on a different epitope on the same target can be deduced by structural superposition of the different complexes.

[1706] A linker with a given sequence and thus of given length can be modelled between the 2 Nanobodies in different ways:
[1707] a. By homology modelling (Sali, and Blundell J. 1993, Mol. Biol. 234: 779-815)
   [1708] i. The sequence of a construct Nanobody1-linker-Nanobody2 or Nanobody2-linker-Nanobody1 is drawn and stored in a readable sequence format (e.g. Fasta)
   [1709] ii. The 3-dimensional coordinates of the biparatopic construct is built by homology modelling by using the 3-dimensional coordinates (from X-ray, NMR or docking experiments) of the individual binding modes of the Nanobodies as a template.
[1710] b. By de-novo design. A linker between the 2 Nanobodies binding on a different epitope on the same target can be build by de-novo design (Hu, et al. 2007, Proc. Natl. Acad. Sci. USA 104(45): 17668-17673).
[1711] c. Several conformations of the linker are sampled and the lowest state energy conformations (1 or more) can be considered.

[1712] As a non-limiting example, the above was performed for a biparatopic construct comprising two Nanobodies. The modelling is shown in FIGS. 22A and 22B, which show a model of Nanobody 2D3 (blue) linked to another Nanobody (cyan) docked on HER-2 (red). Both figures show that we can dock a Nanobody to a target and predict its binding mode to the target. When doing this for several Nanobodies binding on non-overlapping epitopes on the same target, we can design a linker between the Nanobodies to create a multivalent Nanobody construct.

[1713] The 3-dimensional coordinates of the in-silico generated linker in the biparatopic construct are evaluated on at least one of the following criteria:
[1714] a. Internal energy strain of the linker; possibly compared to a set of generated linkers of the same sequence in the free state. At least one but preferentially several energy terms are used (e.g. Van der Waals energy, electrostatics energy, dihedral angle deformation energy, etc.). To calculate the energy values an atom-based force-field (e.g. CHARMM (Brooks et al. 1983, J. Comp. Chem. 4: 187-217)) or other means of calculating potential energy (e.g. potentials of mean force (Muegge and Martin 1999, J. Med. Chem. 42: 791)) can be used.
[1715] b. Internal energy strain on at least one of the residues (amino-acids) of the linker. For three biparatopic constructs 5F7-35GS-47D5, 47D5-35GS-5F7 and 47D5-40GS-5F7 energy penalty values were calculated for each residue in the linker as well as for 10 residues of each Nanobody connected to the linker. Energy values are shown in FIGS. 22, 23 and 24.
[1716] c. The root-mean square deviation (RMSD) between the 3-dimensional coordinates of the 2 Nanobodies in the biparatopic construct and the 2 Nanobodies in their non-linked (monovalent) binding mode. The higher this value the less likely this linker is appropriate. FIG. 25 shows the backbone RMSD (Å²) between the 5F7-linker-47D5 constructs (built by homology modelling) with the individual Nanobodies 5F7 and 47D5 in their unlinked binding mode. The linker length varies from 5 to 35. FIG. 25A shows that the RMSD-value is at a minimum value with linker lengths larger or equal to 15 residues. When shorter linkers are used (e.g. linker length=5, 10) we see an increased RMSD indicating that the Nanobodies in the bivalent construct are deviating from their monovalent binding mode. These in-silico experiments suggest that biparatopic constructs with linker lengths lower than 15 residues will have a significant deviation from the optimal binding mode of the individual Nanobodies to the target. In FIG. 25B a ribbon view is shown of the 5F7-linker-47D5 biparatopic construct for 2 linker lengths. The binding mode of the individual Nanobodies is shown in blue; the biparatopic constructs are in red. When a 35GS linker is used between the 2 Nanobodies and a very limited deviation from the individual binding modes is observed. However, when a 5GS linker is used, both Nanobodies in the biparatopic construct significantly deviate from their optimal binding mode.
[1717] d. Scores from scoring functions in homology modelling protocols which are derived based on a combination of experimental data and in-silico results (Sali & Overington, Protein Science 3(9):1582-1596, 1994).

[1718] As can be seen from the above results, the linker in this specific example should preferably be at least 15 amino acids in length, with linkers of between 20 and 40 amino acid residues, such as about 25, 30 or 35 amino acid residues, being particularly suited.

[1719] Also, constructs with different potentially suitable linker lengths (as determined by the above in silico analysis) may be prepared and tested for affinity/avidity, specificity, or potency using suitable binding assays or in vitro or in vivo potency assays, for example those mentioned in the present specification. In this way, optimal linker length may be determined, confirmed or verified.

### Example 20

### Construction of Multiparatopic Nanobodies for Broader Biological Activity

[1720] Simultaneous binding of 2 adjacent, non-overlapping epitopes by both arms of a biparatopic Nanobody without significant loss of entropy endows biparatopic Nanobodies with increased binding affinity to the target and as a result, higher potency can be obtained. The engineering of Nanobody fragments to obtain an increased potency or broader activity is not limited to the construction of biparatopic Nanobody fragments. Engineering of triparatopic and even tetratopic Nanobodies with careful selection of the epitopes targeted on the antigen, combined with rational design of linkers to allow maximal flexibility of the binding domains within the multiparatopic antibody, may for example result in the blocking of several critical interaction sites of the target, leading to improved potency and even an unparalleled biological activity.

### Tables

TABLE B-1
Preferred Nanobodies against HER2 obtained as described in Example 3

<Name, SEQ ID #; PRT (protein); ->
<13D11, SEQ ID NO: 2051; PRT; ->
EVQLVESGGGLVHPGGSLRLSCVGSGFSLDDYGMTW
VRRAPGKGLEWVSSINWSGTHTDYADSVKGRFTISRDNAKNTLFLQMNSLNPEDTAVYYCGQGWKIVPTNPRGHGTQVTVSS
<2B4, SEQ ID NO: 2052; PRT; ->
EVQLVESGGGLVQPGGSLRLSCVGSGFSLDDYAMTW
VRQAPGKGLEWVSSINWSGTHTDYADSVKGRFTISRDNAKNTLFLQMNSLSPEDTAVYYCNQGWKIRPTIPMGHGTQVTVSS
<2G2, SEQ ID NO: 2053; PRT; ->
EVQLVESGGGLVQPGGSLRLSCVASGFSLDDYGMTW
VRQAPGKGLEWVSSINWSGTHTDYTDPVKGRFTISRDNAKNTLFLQMNNLTPEDTAVYYCNRGWKIVPTDLGGHGTQVTVSS
<13D2, SEQ ID NO: 2054; PRT; ->
EVQLVESGGGLVQPGGSLRLSCVASGFSLDDYGMTW
VRQAPGKGLEWVSSINWSGTHTDYADSVKGRFTISRDNAKNTLFLQMNNLRSEDTAVYSCNQGWKIVPTDRGGHGTQVTVSS
<2D5, SEQ ID NO: 2055; PRT; ->
EVQLVESGGGLVQPGGSLRLSCVASGFSLDDYGMTW
VRQAPGKGLEWVSSINWSGTHTDYADSVKGRFTISRDNAKNTLFLQMNSLRSEDTAVYYCNQGWKIVPTDRGGHGTQVTVSS
<2F4, SEQ ID NO: 2056; PRT; ->
EVQLVESGGGLVQPGGSLRLSCVASGFSLDDYGMTW
VRQAPGKGLEWVSSINWSGTHTDYADSVKGRFTISRDNAKNTLFLQMNSLRSEDTAVYYCNQGWKIVPTDRRGHGTQVTVSS
<2C3, SEQ ID NO: 2057; PRT; ->
EVQLVESGGGLVQPGGSLRLSCVASGFSLDDYGMTW
VRQAPGKGLEWVSSINWSGTHTDYADSVKGRFTISRDNAKNTLFLQMNSLRSEDTAVYYCNQGWKIVPTDRTGHGTQVTVSS
<17E3, SEQ ID NO: 2058; PRT; ->
EVQLVESGGGLVQAGGSLRLSCVASKMTFMRYTMGW
YRQAPGKQRDLVASIDSSGGTNYADSVKGRFTISRDNAKNTVYLEMNSLTPEDTAVYYCNQGWKIVPTDRTGHGTQVTVSS
<17H3, SEQ ID NO: 2059; PRT; ->
EVQLMESGGGLVQPGGSLRLSCVASGFSLDDYGMTW
VRQAPGKGLEWVSSINWSGTHTDYADSVKGRFTISRDNAKNTLFLQMNSLRSEDTAVYYCNQGWKIVPTDRGGHGTQVTVSS
<17D2, SEQ ID NO: 2060; PRT; ->
EVQLVESGGGLVQPGGSLRLSCVASGFSLDDYGMTW
VRQAPGKGLEWVSSINWSGTHTDYADSVKGRFTISRDNAKNTLFLQMNSLRSEDTAVYYCNQGWKIVPTDRGSHGTQVTVSS
<2F1, SEQ ID NO: 2061; PRT; ->
EVQLVESGGGLVQPGGSLRLSCVASGFSLDDYGMTW
VRQAPGKELEWISSINWSGTHTDYADSVKGRFTISRDNAKNTLFLQMNSLTPEDTAVYYCNQGWKIVPMDRRGHGTQVTVSS
<2E2, SEQ ID NO: 2062; PRT; ->
EVQLVESGGGLVQPGGSLRLSCVASGFSLDDYGMTW
VRQAPGKGLEWVSSINWSGTHTDYADSVKGRFTISRDNAKNTLFLQMNSLTPEDTAVYYCNQGWKIIPTDRRGHGTQVTVSS
<2C2, SEQ ID NO: 2063; PRT; ->
EVQLVESGGGLVQGGSLRLSCVASGFSLDDYAMTW
VRQAPGKGLEWVSSINWSGTHTDYADSVKGRFTISRDNARNTLFLQMNSLTPEDTAIYYCNQGWKILPTDRRGHGTQVTVSS
<2E3, SEQ ID NO: 2064; PRT; ->
EVQLVESGGGLVQPGGSLRLSCVASGFSLDDYGMTW
VRQAPGKGLEWVSSINWSGTHTDYADSVKGRFTISRDNAKNTLFLQMNSLSPEDTAVYYCNQGWKILPTNRGSHGTQVTVSS
<13B10, SEQ ID NO: 2065; PRT; ->
EVQLVESGGGLVQPGGSLRLSCVASGFSLDDYGMTW
VRQAPGKGFEWVSSINWSGTHTDYADSVKGRFTISRDNAKNTLFLQMNSLSPEDTAVYYCNQGWKILPTNRGSHGTQVTVSS
<2D1, SEQ ID NO: 2066; PRT; ->
EVQLVESGGGLVQPGGSLRLSCVASGFSLDDYGMTW
VRQAPGKGLEWVSSINWSGTHTDYADSVKGRFTISRDNAKNTLFLQMNSLSPEDTAVYYCNRGWKILPTNRGSHGTQVTVSS
<2H3, SEQ ID NO: 2067; PRT; ->
EVQLVESGGGLVQPGGSLRLSCVASGFSLDDYGMTW
VRQAPGKGLEWVSSINWSGTHTDYADSVKGRFTISRDNAKNTLFLQMNSLTPEDTAVYYCNQGWKIIPTDRRGHGTQVTVSS
<2H1, SEQ ID NO: 2068; PRT; ->
EVQLVESGGGLVQPGGSLRLSCVASGFSLDDYGMTW
VRQAPGKGLEWVSSINWSGTHTDYADSVRGRFVISRDNAKNTLFLQMNSLSPEDTAVYYCNQGWKIIPTDRRGHGTQVTVSS
<2C1, SEQ ID NO: 2069; PRT; ->
EVQLVESGGGLVQPGGSLRLSCVASGFSLDDYGMTW
VRQAPGKGLEWVSSINWSGTHTDYTDSVKGRFTISRDNAKNTLFLQMNSLTPEDTAVYYCNQGWKIIPTDRRGHGTQVTVSS
<15C5, SEQ ID NO: 2070; PRT; ->
EVQLVESGGGLVQPGGSLKLSCVASGFSLDDYGMTW
VRQAPGKGLEWVSSINWNVTHTDYAYSVKGRFTISRDNAKNTLFLQMNSLTPEDTAVYYCNQGWKIIPTDRRGHGTQVTVSS
<2B3, SEQ ID NO: 2071; PRT; ->
EVQLVESGGGLVQPGGSLRLSCVASGFSLDDYGMTW
VRQAPGKGLEWVSSINWSGTHTDCADSVKGRFTISRDNAKNTLFLQMNSLTPEDTAVYYCNQGWKIIPTDRRGHGTQVTVSS
<29H2, SEQ ID NO: 2072; PRT; ->
EVQLVESGGGLVQGGSLRLSCVASGFSLDDYGMTW
VRQAPGKGLEWVSSINWSGTHTDYADSVKGRFTISRDNAKNTLFLQMNNLTPEDTAVYYCNQGWKIIPTDRRGHGTQVTVSS
<17E4, SEQ ID NO: 2073; PRT; ->
EVQLVESGGGLVQPGGSLRLSCVASGFSLDDYGMTW
VRQAPGKGLEWVSSINWSGTHTDYADSVKGRFVISRDNAKNTLFLQMNSLSPEDTAVYYCNQGWKIIPTDRRGHGTQVTVSS
<17A2, SEQ ID NO: 2074; PRT; ->
EVQLVESGGGLVQPGGSLRLSCVASGFSLDDYAMTW
VRQAPGKGLEWVSSINWSGTHTDYADSVKGRFTISRDNAKNTLFLQMNSLSPEDTAVYYCNKGWKVWPTDRGTHGTQVTVSS
<15D1, SEQ ID NO: 2075; PRT; ->
EVQLVESGGGLVQPGGSLRLSCVASGFSLDDYAMTW
VRQAPGKGLEWVSSINWSGTHTDYADSVKGRFTISRDNAKNTLFLQMNSLNPEDTAVYYCNQGWKVWPTDRGTHGTQVTVSS
<17B8, SEQ ID NO: 2076; PRT; ->
EVQLVESGGGLVQPGGSLRLSCVASGFSLDDYGMTW
VRQAPGKGLEWVSSINWSGTHTDYADSVKGRFTISRDNAKNTLFLQMNSLTPEDTAVYYCNQGWKILPAERRGHGTQVTVSS
<15C11, SEQ ID NO: 2077; PRT; ->
EVQLVESGGGLVQPGGSLRLSCVASGFSLDDYGMTW
VRQAPGKGLEWVSSINWSGTHTDYADSVKGRFTISRDNAKNTLFLQMNSLTPEDTAVYYCNQGWKILPAERRGHGTPVTVSS
<15G8, SEQ ID NO: 2078; PRT; ->
EVQLVESGGGLVQPGGSLKLSCVASGFSLDDYGMTW
VRQAPGKGLEWVSSINWNGTHTDYAYSVKGRFTISRDNAKNTLFLQMNSLTPENTAVYYCNQGWKILPAERRGHGTVTVSS
<17H4, SEQ ID NO: 2079; PRT; ->
EVQLVESGGGLVQPGGSLRLSCVASGFSLINYAMTW
VRQAPGKGLEWVSSINWSGTHTDYADSVKGRFTISRDNAKNTLFLHMNNLSPEDTAVYYCGQGWKIHPADRGGHGTQVTVSS
<27G8, SEQ ID NO: 2080; PRT; ->
EVQLVESGGGLVQPGGSLRLSCVASGFSLDDYGMTW
VRQAPGKGLEWVSSINWSGTHTDYADSVKGRFTISRDNAKNTLFLQMNSLTPEDTAVYYCNQGWKILPAERRGHGTQVTVSS
<38C6, SEQ ID NO: 2081; PRT; ->
EVQLVESGGGLVQPGGSLRLSCVGSGFSLDDYAMTW
VRQAPGKGLEWVSSINWSGTHTDYADSVKGRFTISRDNAKNTLFLQMNSLSPEDTAVYYCNQWKIRPTIPMGHGTQVTVSS
<2A4, SEQ ID NO: 2082; PRT; ->
EVQLVESGGGLVQPGGSLRLSCAASGFIFDDYAMSW
VRQAPGKGLEWVSAINWSGSHRNYADSVKGRFTISRDNAKKTVYLQMNSLQSEDTAVYYCGTGWQSTTKNQGYWGQGTQVTVSS
<15G7, SEQ ID NO: 2083; PRT; ->
EVQLVESGGGLVQPGGSLRLSCAASGFIFDDYAMSW
VRQAPGKGLEWVSAINWSGTHRNYADSVKGRFTISRDNNKKTVYLQMNSLKSEDTAVYYCATGWQSTTKNQGYWGQGTQVTVSS
<15B7, SEQ ID NO: 2084; PRT; ->
EVQLVESGGGLVQPGGSLKLSCAASGFIFDDYAMSW
VRQAPGKGLEWVSAINWSGSHRNYADSVKGRFTISRDNAKKTVYLQMNSLQSEDTAVYYCGTGWQSTTKSQGYWGQGTQVTVSS
<5G4, SEQ ID NO: 2085; PRT; ->
EVQLVESGGGLVQPGGSLTLSCAGSGFIFDDYAMSW
VRQAPGKGLEWVSSINWSGSHRNYADSVKGRFTISRDNAKKTLYLQMNSLKSEDTAVYYCATGWQSTTKNQNYWGQGTQVTVSS
<13B2, SEQ ID NO: 2086; PRT; ->
EVQLVESGGSLVQPGGSLRLSCAASGFTFDDYAMSWVRQAPGKGLEW
ISSINWSGTHKDYADSVKGRFTISRNNANNTLYLQMNNLKFEDTAVYYCAKNWRDAGTTWFEKSGSAGQGTQVTVSS
<2E5, SEQ ID NO: 2087; PRT; ->
EVQLVESGGSLVQPGESLRLSCAASGFTFDDYAMSWVRQAPGKGLEW
ISSINWSGTHTDYADSVKGRFTISRNNANNTLYLQMNNLKFEDTAVYYCAKNWRDAGTTWFEKSGSAGQGTQVTVSS
<15G1, SEQ ID NO: 2088; PRT; ->
EVQLVESGGSLVPPGGSLRLSCAASGFTFDDYAMSWVRQAPGKGLEW
VSSINWSGTHTDYTDSVKGRFTISRNNANNTLYLQMNSLKSEDTAVYYCAKNWRDAGTTWFEKSGSAGQGTQVTVSS
<27B1, SEQ ID NO: 2089; PRT; ->
EVQLVESGGSLVQPGGSLRLSCAASGFTFDDYAMSWVRQAPGKGLEW
ISSINWSGTHTDYADSVKGRFTISRNNANNTLYLQMNNLKFEDTAVYYCAKNWRDAGTTWFEKSGSAGQGTQVTVSS
<17E7, SEQ ID NO: 2090; PRT; ->
EVQLVESGGSLVQPGGSLRLSCAASGFTFDDYAMSWVRQVPGKGLEW
VSSINWSGTHTDYADSVKGRFTISRNNANNTLYLQMNSLKSEDTAVYYCAKNWRDAGTTWFEKSGSAGQGTQVTVSS
<17D8, SEQ ID NO: 2091; PRT; ->
EVQLVESGGSLVPPGGSLRLSCAVSGFTFDDYAMSWVRQAPGKGLEW
VSSINWSGTHTDYTDSVKGRFTISRNNANNMLYLQMNSLKSEDTAVYYCAKNWRDAGTTWFEKSGSAGQGTQVTVSS
<5F8, SEQ ID NO: 2092; PRT; ->
EVQLVESGGSLVQPGGSLRLSCAASGFTFDDYALSWVRQAPGKGLEW
ISSINWSGTHTDYADSVKGRFTISRNNANNTLYLQMNNLKFEDTAVYYCAKNWRDAGTTWFEKSGSAGQGTQVTVSS
<2D4, SEQ ID NO: 2093; PRT; ->
EVQLVESGGSLVQPGGSLRLSCAASGFTFDDYAMTWVRQAPGKGLEW
VSSINWSGTHTDYADSVKGRFTISRNNANNTLYLQMNSLKSDDTAVYYCAKNWGDAGTTWFEKSGSAGPGTQVTVSS
<13D8, SEQ ID NO: 2094; PRT; ->
EVQLVESGGSLVQPGGSLRLSCAASGFTFDDYAMTWVRQASGKGLEW
VSSINWSGTHTDYTDSVKGRFTISRNNANNTLYLQMNSLKSEDTAVYYCAKNWGDAGTTWFEKSGSAGQGTQVTVSS
<17G8, SEQ ID NO: 2095; PRT; ->
EVQLVESGGSLVPPGGSLRLSCAASGFTFDDYAMSWVRQAPGKGLEW
VSSINWSGTHTGYTDSVKGRFTISRNNANNTLYLQMNSLKSEDTAVYYCAKNWGDAGTTWFEKSGSAGQGTQVTVSS
<2H4, SEQ ID NO: 2096; PRT; ->
EVQLVESGGSLVQPGGSLRLSCAASGFTFDDYAMTWVRQAPGKGLEW
VSSINWSGTHTDYTDSVKGRFTISRNNANNTLYLQMNSLKSEDTAVYYCAKNWGDAGTTWFEKSGSAGQGTQVTVSS
<2F3, SEQ ID NO: 2097; PRT; ->
EVQLVESGGSLVQPGGSLRLSCAASGFTFDDYAMTWVRQAPGKGLEW
VSSINWSGTHTDYTGSVKGRFTISRNNANNTLYLQMNSLKSDDTAVYYCAKNWGDAGTTWFEKSGSAGPGTQVTVSS
<2F5, SEQ ID NO: 2098; PRT; ->
EVQLVESGGSLVPPGGSLRLSCAASGFTFDDYAMSWVRQAPGKGLEW
VSSINWSGTHTDYTDSVKGRFTISRNNANNTLYLOMNSLKSEDTAVYYCAKNWGDAGTTWFEKSGSAGQGTQVTVSS
<30E10, SEQ ID NO: 2099; PRT; ->
KVQLVESGGSLVPPGGSLRLSCAASGFTFDDYAMTWVRQAPGKGLEW
VSSINWSGTHTDYTDSVKGRFTISRNNANNTLYLQMNSLKSEDTAVYYCAKNWGDAGTTWFEKSGSAGQGTQVTVSS
<29H1, SEQ ID NO: 2100; PRT; ->
EVQLVESGGSLVPPGGSLRLSCAASGFTFDDYAMSWVRQAPGKGLEW
VSSINWSGTHTGYTDSVKGRFTISRNNANNTLYLQMNSLKSEDTAVYYCAKNWGDAGTTWFEKSGSAGQGTQVTVSS
<17E2, SEQ ID NO: 2101; PRT; ->
EVQLVESGGSLVPPGGSLRLSCAASGFTFDDYGMSWVRQAPGKGLEW
VSSINWSGTHTDYTDSVKGRFTISRNNANNTLYLQMNSLKSEDTAVYYCAKNWGDAGTTWFEKSGSAGQGTQVTVSS
<2B1, SEQ ID NO: 2102; PRT; ->
EVQLVESGGSLVQPGGSLRLSCAASGFTFDDYAMTWVRQAPGKGLEW
VSSINWSGTHTDYTDSVKGRFTISRNNANNTLYLQMNSLKSDDTAVYYCAKNWGDAGTTWFEKSGSAGPGTQVTVSS
<2A5, SEQ ID NO: 2103; PRT; ->
EVQLVESGGGLVQPGGSLRLSCATSGFTFDDYAMTWVRQAPGKGLEW
VSSINWSGTHTDYTDSVKGRFTISRNNANNTLYLQMNSLKSEDTAVYYCAKNWGDAGTTWFEKSGSAGQGTQVTVSS
<13C12, SEQ ID NO: 2104; PRT; ->
EVQLVESGGSLVQPGGSLRLSCATSGFTFDDYAMTWVRQAPGKGLEW
VSSINWSGTHTDYTDSVKGRFTISRNNANNTLYLQMNSLKSEDTAVYYCAKNWGDAGTTWFEKSGSAGQGTQTVSS
<17E10, SEQ ID NO: 2105; PRT; ->
EVQLVESGGSLVQPGGSLRLSCAASGFTFDDYAMTWVRQAPGKGLEW
VSSINWSGTHTDCTDSVKGRFTISRNNANNTLYLQMNSLKSEDTAVYYCAKNWGDAGTTWFEKSGSAGQGTQVTVSS
<27D4, SEQ ID NO: 2106; PRT; ->
EVQLVESGGSLVQPGGSLRLSCAASGFTFDDYAMTWVRQASGKGLEW
VSSINWSGTHTDYADSVKGRFTISRNNANNTLYLQMNSLKSEDTAVYYCAKNWGDAGTTWFEKSGSAGQGTQTVSS
<15F9, SEQ ID NO: 2107; PRT; ->
EVQLVESGGSLVQPGGSLRLSCAASGFTFDDYAMTWVRQAPGKGLEW
VSSINWSGTHTDYTGSVKGRFTISRNNANNTLYLQMNSLKSDDTAVYYCAKNWGDAGTTWFEKSGSAGQGTQVTVSS
<30H9, SEQ ID NO: 2108; PRT; ->
EVQLVESGGSLVQPGGSLRLSCAASGFTFDDYAMTWVRQAPGKGLEW
VSSINWSGTHTDYTDSVKGRFTISRNNANNTLYLQMNSLKSEDTAVYYCAKNWGDAGTTWFEKSGSAGQGTQVTVSS
<39C1, SEQ ID NO: 2109; PRT; ->
EVQLVESGGSLVPPGGSLRLSCAASGFTFDDYGMSWVRQAPGKGLEW
VSSINWSGTHTDYTDSVKGRFTISRNNANNTLYLQMNSLKSEDTAVYYCAKNWGDAGTTWFEKSGSAGQGTQVTVSS
<27G2, SEQ ID NO: 2110; PRT; ->
EVQLVESGGSLVQPGGSLRLSCAASGFTFDDYAMTWVRQTPGKGLEW
VSSINWSGTHTDYTDSVKGRFTISRNNANNTLYLQMNSLKSDDTAVYYCAKNWGDAGTTWFEKSGSAGPGTQVTVSS
<2D3, SEQ ID NO: 2111; PRT; ->
EVQLVESGGSLVQPGGSLRLSCAASGFTFDDYAMSWVRQVPGKGLEW
VSSINWSGTHTDYADSVKGRFTISRNNANNTLYLQMNSLKSEDTAVYYCAKNWRDAGTTWFEKSGSAGQGTQVTVSS
<5F7, SEQ ID NO: 2112; PRT; ->
EVQLVESGGGLVQAGGSLRLSCAASGITFSINTMGWYRQAPGKQREL
VALISSIGDTYYADSVKGRFTISRDNAKNTVYLQMNSLKPEDTAVYYCKRFRTAAQGTDYWGQGTQVTVSS
<47D5, SEQ ID NO: 2114; PRT; ->
KVQLVESGGGLVQPGGSLRLSCAASGSIFGFNDMAWYRQAPGKQREL
VALISRVGVTSSADSVKGRFTISRVNAKDTVYLQMNSLKPEDTAVYYCYMDQRLDGSTLAYWGQGTQVTVSS
<14B11, SEQ ID NO: 2115; PRT; ->
EVQLVESGGGLVQAGGSLRLSCAASGSTFSSYGMGWFRQVPGKEREF
VATINWSGVTAYADSVKGRFTISRDNAKKTVYLQMNSLKPEDTARYYCGVETYGSGSSLMTEYDYWGQGTQVTVSS
<14B10, SEQ ID NO: 2116; PRT; ->
EVQLVESGGGLVQAGGSLRLSCAVNSRTFSSYGMGWFRQAPGKEREF
VATINWSGVTAYADSIKGRFTISRDNAKETVYLQMNSLKPDDTGVYYCAAETYGSGSSLMSEYDYWGQGTQVTVSS
<14B4, SEQ ID NO: 2117; PRT; ->
EVQLVESGGGLVQAGGSLRLSCAVSSRAFSSYGMGWFRQAPGKDREF
VATINWSGVTAYADSIKGRFTISRDNAKETVYLQMNSLKPEDTGVYYCAAETYGSGSSLMSEYDYWGQGTQVTVSS
<14C11, SEQ ID NO: 2118; PRT; ->
EVQLVESGGGLVQAGGSLRLSCAVNSRTFSSYGMGWFRQAPGKEREF
VATINWSGATAYADSIKGRFTISRDNAKETVYLQMNSLKPDDTGVYYCAAETYGSGSSLMSEYDYWGQGTQVTVSS
<14B5, SEQ ID NO: 2119; PRT; ->
EVQLVESGGGLVQAGGSLRLSCAVSSRAFSSYGMGWFRQAPGKDREF
VATINWSGVTAYADSIKGRFTISRDNAKETVYLQMNSLKPDDTGVYYCAAETFGSGSSLMSEYDYWGQGTQVTVSS
<14C6, SEQ ID NO: 2120; PRT; ->
EVQLVESGGGSVQAGGSLRLSCVASEGTFSSYGMGWFRQAPGKERAF
VATINWSGVTAYADSVKGRFTISRDNAKKTVYLQMNSLKPEDTAVYYCATDTYGSGSSLMNEYDYWGQGTQVTVSS
<14A4, SEQ ID NO: 2121; PRT; ->
EVQLVESGGGSVQAGSSLTLSCVASEGTFSSYGMGWFRQAPGKERAF
VATINWSGVNAYADSVKGRFTISRDNAKKTAYLQMNSLKPEDTAVYYCAAETYGSGSSLMNEYDYWGQGTQVTVSS
<14B3, SEQ ID NO: 2122; PRT; ->
EVQLVESGGGLVQPGGSLTLSCVASEGTFSSYGMGWFRQAPGKERAF
VATINWSGVNAYADSVKGRFTISRDNAKKTAYLQMNSLKPEDTAVYYCAAETYGSGSSLMNEYDYWGQGTQVTVSS
<14C1, SEQ ID NO: 2123; PRT; ->
EVQLVESGGGSVQAGGSLRLSCAASGSTFSSYGMGWFRQAPGKERAF
VATINWSGVTAYADSVKGRFTISRDNAKKTVYLQMNSLKPEDTAVYYCATETYGSGSSLMNEYDYWGQGTQVTVSS
<14A12, SEQ ID NO: 2124; PRT; ->
EVQLVKSGGGLVQAGGSLRLSCAASERTFSSYGMGWFRQAPGKEREF
VATINWSGVTAYADSVKGRFTISRDNAKKTVYLQMNSLKPEDTAVYYCAAEPYGSGSSLISEYDYWGHGTQVTVSS
<14A2, SEQ ID NO: 2125; PRT; ->
EVQLVESGGGLVQAGGSLRLSCAASERTFSSYGMGWFRQAPGKEREF
VATINWSGVTAYADSVKGRFTISRDNAKKTVYLQMNSLKPEDTAVYYCAAEPYGSGSSLISEYDYWGHGTQVTVSS
<14A1, SEQ ID NO: 2126; PRT; ->
EVQLVESGGGSVQAGGSLRLSCAASERTFSSYGMGWFRQAPGKEREF
VATINWSGVTAYADSVKGRFTISRDNAKKTVYLQMNSLKPEDTAVYYCAAEPYGSGSSLMSEYDYWGHGTQVTVSS
<17C3, SEQ ID NO: 2127; PRT; ->
EVQLVESGGGLVQAGGSLRLSCAANGLTFRRYDMGWYRQAPGQQREW
VAAISGAGDINYADSVKGRFTMARDNANHTVHLQMNSLKPEDTAVYYCNANWKMLLGVENDYWGQGTQVTVSS
<46D3, SEQ ID NO: 2128; PRT; ->
KVQLVESGGGLVQAGGSLRLSCAASGRTFTEYSMGWFRQAPGKEREF
VATISWNYGYTYYSDSVKGRFTVSRDIAENTVYLQMNTLKSEDTAVYYCAAKIGWLSIRGDEYEYWGQGTQVTVSS
<27H5, SEQ ID NO: 2129; PRT; ->
EVQLVESGGGLVQAGGSLRLSCAASGFTFDDYGIGWFRQASGKEREG
VSCITSSDGSTYYADSVKGRFTISSDNAKNTVYLQMNSLKPEDTAVYYCAALPFVCPSGSYSDYGDEYDYWGQGTOVTVSS
<17C2, SEQ ID NO: 2130; PRT; ->
EVQLVESGGGLVQPGGSLRLSCAASGFAFSSYAMSWVRQAPGKGLEW
VSAVDSGGGRTDYAHSVKGRFTISRDNAKNTLYLQMSSLKPEDTALYYCTKHVSDSDYTEYDYWGQGTQVTVSS
<17D11, SEQ ID NO: 2131; PRT; ->
EVQLVESGGGLVQAGGSLRLSCTASGRTSSTSAMGWFRQAPGKEREF
VATISRGGSATYYADSLKGRFTISRDNAKNTLYLQMNSLKPEDTAVYYCAARRSSLYTSSNVFEYDYWGQGTQVTVSS
<15A6, SEQ ID NO: 2132; PRT; ->
EVQLVESGGGLVQAGGSLRLSCVTSRRPASTRTMAWYRQAPGKQRDW
VATISSHGLPVYADSVKGRFTVSRDNANNTVYLQMNTLKPEDTAVYYCRDVNADYWGQGTQVTVSS
<17B6, SEQ ID NO: 2133; PRT; ->
EVQLVESGGGLVQPGGSLRLSCAASRIPFSTRTMAWYRQAPGKQRDW
VATIGTSGPPRYADSVKGRFTVSRDNAKNTVYLQMNSLKAEDTAVYYCWDVNADYWGQGTQVTVSS
<17C5, SEQ ID NO: 2134; PRT; ->
EVQLVESGGGLVQAGGSLRLSCVTSRRPASTRTMAWYRQAPGKQRDW
VATISSHGLPVYADSVKGRFTVSRDNANNTVYLQMNTLKPEDTAVYYCRDVNADYWGQGTPVTVSS
<15E11, SEQ ID NO: 2135; PRT; ->
EVQLVESGGGLVQAGGSLRLSCVASRIPFSSRTMAWYRQAPGKQRDW
VATISARGMPAYEDSVKGRFTVSRDNDKNTLYLQMNSLKPEDTAVYYCRDVNADYWGQGTQVTVSS
<15C2, SEQ ID NO: 2136; PRT; ->
EVQLVESGGGLVQAGGSLRLSCVTSRRPASTRTMAWYRQAQGKQRDW
VATISSHGLPVYADSVKGRFTVSRDNANNTVYLQMNTLKPEDTAVYYCRDVNADYWGQGTQVTVSS
<2A3, SEQ ID NO: 2137; PRT; ->
EVQLVESGGGLVQAGGSLNLSCVASGIPFSTRTMAWYRQAPGKPRDW
VATIRNGAPVYADSVKGRFTVSRDNAKNTLYLQMNSLKPEDTATYLCRDVNGDIWGQGTQVTVSS
<27A5, SEQ ID NO: 2138; PRT; ->
EVQLVESGGGLVQAGGSLNLSCVASGIPFSTRTMAWYRQPPGNERDW
VATIRSGAPVYADSVKGRFTVSRDNAKNTLYLQMNSLEPEDTATYYCWDVNGDIWGQGTPVTVSS
<2C5, SEQ ID NO: 2139; PRT; ->
EVQLVESGGGLVQAGGSLNLSCVASGIPFSTRTMAWYRQTPGKSRDW
VATIRSGTPVYADSVKGRFTVSRDNAKNTLYLRMNSLKSEDSATYTCRAVNADIWGQGTQVTVSS
<27G5, SEQ ID NO: 2140; PRT; ->
EVQLVESGGGLVQPGGSLRLSCVASRIPASIRTMAWYRQTPGNQRDW
LATIGSSGTPAYADSVKGRFTVSRDNAKNTVYLQMNSLKPEDTAVYYCRDVNGDYWGQGTQVTVSS
<13A9, SEQ ID NO: 2141; PRT; ->
EVQLVESGGGLVQAGGSLRLSCVASRIPASIRTMAWYRQAPGKQRDW
VATIGTGGTPAYADSFKGRFTVSRDNANHTVYLQMNSLKPEDTAVYYCRDVNGDYWGQGTQVTVSS
<29E9, SEQ ID NO: 2142; PRT; ->
EVQLVESGGGLVQPGGSLRLSCVASRIPASIRTMAWYRQTPGNQRDW
LATIGSSGTPAYADSVKGRFTVSRDNAKNTVYLQMNSLKPEDTAVYYCRDVNGDYWGQGTQVTVSS
<15D8, SEQ ID NO: 2143; PRT; ->
EVQLVESGGGLVQPGGSLKLSCVASTIPASIRTMAWYRQTPGNQRDW
LATIGSSGTPAYADSVKGRFTVSRDNAKNTVYLQMNSLKPEDTAVYYCRDVNGDYWGQGTQVTVSS
<15G4, SEQ ID NO: 2144; PRT; ->
EVQLVESGGGLVQAGGSLRLSCVASGIPFRSRTMAWYRQAPGKTRDW
VATIGTHGTPLYADSVKGRFTVSRDNAKNTLYLQMNSLKPEDTAVYYCWDVNGDYWGQGTQVTVSS
<15D12, SEQ ID NO: 2145; PRT; ->
EVQLVESGGGLVQAGESLRLSCATSGITFKRYVMGWYRQGPGKQREL
VATVNDGGTTSYADSVKGRFAISRDNAKNTAYLQMNSLKAEDTAVYYCNAVWKLPRFVDNDYWGQGTQVTVSS
<15E12, SEQ ID NO: 2146; PRT; ->
EVQLMESGGGLVQAGGSLRLSCAANGLTFRRYDMGWYRQAPGQQREW
VAAISGAGDINYADSVKGRFTMARDNANHTVHLQMNSLKPEDTAVYYCNANWKMLLGVENDYWGQGTQVTVSS
<13D7, SEQ ID NO: 2147; PRT; ->
EVQLVESGGGLVQAGGSLRLSCAANGLTFRRYDMGWYRQAPGQQREW
VAAISGAGDINYADSVKGRFTMARDNANHTVHLQMNSLKPEDTAVYYCNANWKMLLGVENDYWGQGTQVTVSS
<13A8, SEQ ID NO: 2148; PRT; ->
EVQLVESGGGLVQPGGSLRLSCAASGLGIAFSRRTMAWYRQAPGKQR
DWVATIAGDGSTVYADSMKGRFTISRDNAENTVYLQMNSLKPEDTAVYYCWDVNRDYWGQGTQVTVSS
<15A4, SEQ ID NO: 2149; PRT; ->
EVQLVESGGGLVQPGGSLRLSCAASGLGIAFSRRTMAWYRQAPGKQR
DWVATIAGDGSTVYADSMKGRFTISRDNAKNTVYLQINSLKPEDTAVYYCWDVNRDYWGQGTQVTVSS
<17F7, SEQ ID NO: 2150; PRT; ->
EVQLVESGGGLVQAGGSLRLSCVASGIAQSIRVMAWYRQPPGKQRDW
VGTISSDGTANYADSVKGRFTISRDNAKKTMYLQMNSLKPDDTAVYYCRDVNRDYWGQGTQVTVSS
<15C8, SEQ ID NO: 2151; PRT; ->
EVQLVESGGGLVQAGGSLRLSCAASGIAFRIRTMAWYRQAPGKQRDW
VATSDSGGTTLYADSVKGRFTVSRDNAENTVYLQMNSLKPEDTAVYYCRDVNRDYWGQGTQVTVSS
<17A10, SEQ ID NO: 2152; PRT; ->
EVQLVESGGGLVQAGGSLRLSCVASGIPSIRAIAWYRQAPGKQRDW
VATSGTGYGATYDDSVKGRFTLSRDNAKNTVYLQMNSLKPEDTAVYYCRDVNRDYWGQGTQVTVSS
<27D3, SEQ ID NO: 2153; PRT; ->
EVQLMESGGGLVQPGGSLRLSCAASGLGIAFSRRTMAWYRQAPGKQRDW
VATIAGDGSTVYADSMKGRFTISRDNAENTVYLQMNSLKPEDTAVYYCWDVNRDYWGQGTQVTVSS
<13B12, SEQ ID NO: 2154; PRT; ->
EVQLVESGGGLVQAGGSLRLSCAASGIAFRIRTMAWYRQAPGKQRDW
VATIGSDGTTIYADSVKGRFTLSRHNAENTVYLQMNSLKPEDTAVYYCRDVNRDYWGQGTQVTVSS
<15B2, SEQ ID NO: 2155; PRT; ->
EVQLVESGGGLVQAGGSLRLSCVVSGIPSSIRAMAWYRQAPGRQRDW
VATIYSPSGSAVYADSVKGRFTISSDNAKSTIYLQMNSLKPDDTAVYYCRDVNRDYWGQGTQVTVSS
<15B11, SEQ ID NO: 2156; PRT; ->
EVQLVESGGGSVQAGGSLRLSCVVSGIPSSIRAMAWYRQAPGRQRDW
VATIYSRSGGAVYADSVKGRFTISSDNAKNTIYLQMNSLKPDDTAVYYCRDVNRDYWGQGTQVTVSS
<13C9, SEQ ID NO: 2157; PRT; ->
EVQLVESGGGLVQAGGSLRLSCVASGIPSIHAMAWYRQAPGKQRDW
GATTYSRGGTTYNDSAKGRFTISRDNAKKTVYLQMNSLKPEDTAVYYCRDVNRDYWGQGTQVTVSS
<17D5, SEQ ID NO: 2158; PRT; ->
EVQLVESGGGLVQPGGSLRLSCAASGIIGTIRTMAWYRQAPGKQRDW
VASIGTRGAPVYADSVNGRFTISRDGATNTVFLQMNNLKPEDTAVYYCRDVNRDYWGQGTQVTVSS
<27B5, SEQ ID NO: 2159; PRT; ->
EVQLVESGGGLVQAGGSLRLPCAASGIAFRIRTMAWYRQAPGKQRDW
VATSDSGGTTLYADSVKGRFTVSRDNAENTVYLQMNSLKPEDTAVYYCRDVNRDYWGQGTQVTVSS
<27C7, SEQ ID NO: 2160; PRT; ->
EVQLVESGGGLVQAGGSLRLSCAASGIAFRIRTMAWYRQAPGKQRDW
VATSDSGGTTLYADSVKGRFTVSRDNADNTVYLQMNSLKPEDTAVYYCRDVNRDYWGQGTQVTVSS
<13D4, SEQ ID NO: 2161; PRT; ->
EVQLVESGGGLVQAGGSLRLSCVVSGIPSSIRAMAWYRQAPGRQRDW
VATIYSPSGSAVYADSVKGRFTISSDNAKSTIYLQMNSLEPDDTAVYYCRDVNREYWGQGTQVTVSS
<15G5, SEQ ID NO: 2162; PRT; ->
EVQLVESGGGLVQAGGSLRLSCVVSGIPSTIRAMAWYRQAPGRQRDW
VATIYSPSGSAVYADSVKGRFTISSDNAKKTIYLQMNSLKPDDTAVYYCRDVNREYWGQGTQVTVSS
<13C4, SEQ ID NO: 2163; PRT; ->
EVQLVESGGGLVQAGGSLRLSCVVSGIPSSIRAMAWYRQAPGRQRDW
VATIYSPSGSAVYADSVKGRFTISSDNAKSTIYLQMNSLKPDDTAVYYCRDVNREYWGQGTQVTVSS
<46G1, SEQ ID NO: 2164; PRT; ->
EVQLVESGGGLVQAGGSLRLSCAASGRTFSDDAMGWFRQAPGKEREC
VASLYLNGDYPYYADSVKGRFTISRDNAKNAVILQMNNLKTEDTAVYYCAAKPGWVARDPSQYNYWGQGTQVTVSS
<46E4, SEQ ID NO: 2165; PRT; ->
EVQLVESGGGLVQAGGSLRLSCAASGRAFKDDAVGWFRQAPGKEREC
VASMYLDGDYPYYADSVKGRFTISRDNAKNAVILQMNNLKTEDTAVYYCAAKPGWVARDPSEYNYWGQGTQVTVSS
<17B5, SEQ ID NO: 2166; PRT; ->
EVQLVESGGGLVQTGGSLRLSCAASGSTFRTDMMGWYRQAPGKQREF
VASITKFGSTNYADSVKGRFTISNDNAKDTVYLQMNSLKSEDTAVYYCRNFNRDLWGQGTQVTVSS
<15C9, SEQ ID NO: 2167; PRT; ->
EVQLVESGGGLVQAGGSLKLSCVNSGIPSTLRAMAWYRQAPGRQRDW
VATSSNTGGTTYDDSVKGRFTISRDNAKNTVYLQMNSLKPEDTGVYYCRDVNRDLWGQGTQVTVSS
<13D10, SEQ ID NO: 2168; PRT; ->
EVQLVESGGGLVQPGGSLRLSCAASSVITLDSNAIGWFRQAPGKERE
EVSCIASSDGSTYYAESVKGRFTISKDYTRNTVYLQVNSLKPEDTAVYHCATDANPNCGLNVWNSWGQGTQVTVSS
<17C6, SEQ ID NO: 2169; PRT; ->
EVQLVESGGGLVQAGGSLTLSCAASGSTSSLDIMAWYRQAPEKQREL
VASVSGGGNSDYASSVKGRFTISGDTAKSTLYLQMNSLKPEDTAMYYCYGRDYYYMPFWGQGTQVTVSS
<15A2, SEQ ID NO: 2170; PRT; ->
EVQLVESGGGLAQAGGSLSLSCAASGRFFSTRVMAWYRQTPGKQREF
VASMRGSGSTNYADSARGRFAISRDNAKNTVYLQMNSLKPEDTAVYYCRDINEDQWGQGTQVTVSS
<17A8, SEQ ID NO: 2171; PRT; ->
EVQLVESGGGLVQAGGSLSLSCAASGRFFSTRVMAWYRQTPGKQREF
VASMRGSGSTNYADSVRGRFAISRDNAKNMVYLQMNTLKPEDTAVYYCRDINEDQWGQGTQVTVSS
<15G10, SEQ ID NO: 2172; PRT; ->
EVQLVESGGGLVQAGGSLSLSCAASGRFFSTRVMAWYRQTPGKQREF
VASMRGSGSTNYADSARGRFAISRDNAKNTVYLQMNSLKPEDTAVYYCRDINEDQWGQGTQVTVSS
<27A3, SEQ ID NO: 2173; PRT; ->
EVQLVESGGGLVQAGGSLSLSCVASGRFFSTRVMAWYRQTPGKQREF
VASMRGSGSTNYADSVRGRFAISRDNAKNTVYLQMNTLKPEDTAVYYCRDINEDQWGQGTQVTVSS
<17H10, SEQ ID NO: 2174; PRT; ->
EVQLVESGGGLVQAGGSLSLSCSASGRFFSTRVMAWYRQTPGNQREF
VATIHSSGSTIYADSVRGRFAISRDNAKNTVYLQMRSLKPEDTAVYYCRDINADQWGQGTQVTVSS
<30D10, SEQ ID NO: 2175; PRT; ->
EVQLVESGGGLVQAGGSLTLSCTASETTVRIRTMAWYRQPPGNQREW
VATIGSNGFATYPDSVKGRFTISRDNAKNTVYLQMNSLKPEDTAVYYCRDINRDIWGQGSQVTVSS
<15H4, SEQ ID NO: 2176; PRT; ->
EVQLVESGGGLVQAGGSLTLSCAPSESTVSFNTVAWYRQAPGEQREW
VATISRQGMSTYPDSVKGRFTISRDNAKNTVYLQMNNLKPEDTAVYYCRDINHDIWGRGSQVTVSS
<17B7, SEQ ID NO: 2177; PRT; ->
EVQLVESGGGLVQAGGSLRLSCAASGIISSFRTMAWYRQAPGKQRDW
VATIGSDGLANYADSVKGRFTISRDNAKKTVYLQMNSLKPEDTAVYFCRDINRDYWGQGTQVTVSS
<15D2, SEQ ID NO: 2178; PRT; ->
EVQLVESGGGLVQAGGSLRLSCVVSGVFGPIRAMAWYRQAPGKQRDW
VATIGSSGHPVYTDSVKGRFTFSKDGAKNTVYLQMNSLKPEDTAVYYCRDINRDYWGQGTQVTVSS
<17G5, SEQ ID NO: 2179; PRT; ->
EVQLVESGGGLVQPGGSLRLSCAASGIGIAFSSRTMAWYRQAPGKQRDW
VATIGSGGTTNYADSVKGRFTISRDNAKNTVYLQMNSLKPEDTAVYYCRDINRDYWGQGTQVTVSS
<15B6, SEQ ID NO: 2180; PRT; ->
EVQLVESGGGLVQPGGSLRLSCAASGIIGSFRTMAWYRQAPGNQRDWVA
TIGSAGLASYADSVRGRFTLSRDNAKKTVYLQMNSLKPEDTAIYYCRDINGDYWGQGTQVTVSS
<27F2, SEQ ID NO: 2181; PRT; ->
EVQLVESGGGLVQAGGSLRLSCAASGIISSFRTLAWYRQAPGKQRDWVA
TISSAGGTAYADAVKGRFTISISRDNVEYTVDLQMDSLKPEDTAVYYCRDINGDYWGQGTQVTVSS
<17F5, SEQ ID NO: 2182; PRT; ->
EVQLVESGGGLVQPGGSLRLSCAASGLGIAFSRRTMAWYRQAPGKQRDWVA
TIAGDGSTVYADSMKGRFTISRDNAKNTVYLQVNSLKPEDTAVYYCWDTNGDYWGQGTQVTVSS
<17B2, SEQ ID NO: 2183; PRT; ->
EVQLVESGGGLVQPGGSLRLSCAGSGFTFSNYAMTWVRQAPGKGLEW
VSGVGGDGVGSYADSVKGRFTISRDNAKNTLYLQMNSLKPEDTALYYCTKDISTFGWGPFDYWGQGTQVTVSS
<27H4, SEQ ID NO: 2184; PRT; ->
EVQLVESGGGLVQAGGSLRLSCVASKMTFMRYTMGWYRQAPGKQRDL
VASIDASGGTNYADSVKGRFTISRDNAKNTVYLEMNSLKPEDTGVYYCNGRWDIVGAIWWGQGTQVTVSS
<13A4, SEQ ID NO: 2185; PRT; ->
EVQLVESGGGLVQAGGSLRLSCVASKMTFMRYTMGWYRQAPGKQRDL
VASIDSSGGTNYADSVKGRFTISRDNAKNTVYLEMNSLKPEDTGVYYCNGRWDIVGAIWWGQGTQVTVSS
<2A1, SEQ ID NO: 2186; PRT; ->
EVQLVESGGGLVQAGGSLRLSCVASKITFRRYIMDWYRQAPGKQREL
VASINSDGSTGYTDSVKGRFTISRDNTKNTLDLQMNSLKPEDTAVYYCHGRWLEIGAEYWGQGTQVTVSS
<15E10, SEQ ID NO: 2187; PRT; ->
EVQLVESGGGLVQAGGSLKLSCVASGITFFRYTMGWYRQAPGKEREL
VAEISSADEPSFADAVKGRFTISRDNAKNTVVLQMNGLKPEDTAVYYCKGSWSYPGLTYWGKGTLVTVSS
<27E7, SEQ ID NO: 2188; PRT; ->
EVQLVESGGGLVQAGGSLRLSCAASGITFRRYDMGWYRQFPGKEREL
VATILSEGDTNYVDPVKGRFTISRDNAKNTVYLQMNDLKPEDTAVYYCNGVWRAIGRTYWGQGTQVTVSS
<47E5, SEQ ID NO: 2189; PRT; ->
EVQLVESGGGLVQAGGSLRLSCAASASIFGFDSMGWYRQAPGNERIL
VAIISNGGTTSYRDSVKGRFTIARDNAKNTVSLQMNSLKPEDTAVYYCNLDRRSYNGRQYWGQGTQVTVSS
<2G4, SEQ ID NO: 2190; PRT; ->
EVQLVESGGGLVQAGGSLRLSCAASGNIFSHNAMGWYRQAPGKQREL
VTYITINGIANYVDSVKGRFTISRDNTKNTMYLQMVSLKPEDTAVYYCNVGGREYSGVYYYREYWGQGTQVTVSS
<14D4, SEQ ID NO: 2191; PRT; ->
EVQLVESGGGLVQAGDSLRLSCAASGRALDTYVMGWFRQAPGDGREF
VAHIFRSGITSYASSVKGRFTISRDNAKNTVYLQMASLKPEDTAAYYCAARPSDTTWSESSASWGQGTQVTVSS
<17A5, SEQ ID NO: 2192; PRT; ->
EVQLVESGGGLVQPGGSLRLSCAASGFTFDDYSMSWVRQATGKGLEW
VSGISWNGGSTNYADSVKGRFTISRDNVKNTLYLQMNSLKSEDTAVYYCAKDLGNSGRGPYTNWGQGTQVTVSS
<15D10, SEQ ID NO: 2193; PRT; ->
EVQLVESGGGLVQPGGSLKLSCAASGFTFSSYRMYWVRQAPGKGLEW
VSAIKPDGSITYYADSVKGRFTISRDNAKNTVYLQMNSLKPEDTAVYYCATDCGVPGFGWTFSSWGQGTQVTVSS
<13C2, SEQ ID NO: 2194; PRT; ->
EVQLVESGGGLVQAGGSLRLSCAASGSTFSINRMAWYRQSPGKQREL
VAAVDNDDNTEYSDSVAGRFTISRDNAKNAVHLQMNSLRLEDTAVYYCNAKQLPYLQNFWGQGTQVTVSS
<17G11, SEQ ID NO: 2195; PRT; ->
EVQLVESGGGLVQAGGSLRLSCAASGSTFSINRWGWYRQAPGKQREL
VAAIDDGGNTEYSDFVNGRFTISRDNPETAVHLQMNSLKLEDTAVYYCNAKQLPYLQNFWGQGTQVTVSS
<17A3, SEQ ID NO: 2196; PRT; ->
EVQLVESGGGLVQAGGSLSLSCAASATLHRFDNNWYRQAPGKQREL
VATIAHDGSTNYANSVKGRFTISRDNARDTLFLQMHALQPEDTAVYMCNLHRWGLNYWGQGTQVTVSS
<27B7, SEQ ID NO: 2197; PRT; ->
EVQLVESGGGLVQPGGSLRLSCAASGFTFSSYAMSWVRQAPGKGLEW
VSAISSGGGSITTYADSVKGRFTISRDNAKNTLYLQMSSLKPEDTALYYCAKARSSSSYYDFGSWGQGTQVTVSS
<17A6, SEQ ID NO: 2198; PRT; ->
EVQLVESGGGLVQPGGSLRLSCAASGFTFSSYAMSWVRQAPGKGLEW
VSAISSGGGSITTYADSVKGRFTISTDNAKNTLYLQMSSLKPEDTALYYCAKARSSSSYYDFGSWGQGTQVTVSS
<17D7, SEQ ID NO: 2199; PRT; ->
EVQLVESGGGLVQPGGSLRLSCAASGFTLDYCAIGWFRQAPGKEREG
VSCISSSDGSTYYADSVKGRFTISRDNAKNTVYLQMNSLKPEDTAVYYCATDRGSGTCYADFGSWGQGTQVTVSS
<46D4, SEQ ID NO: 2200; PRT; ->
EVQLVESGGGLVQPGGSLRLSCAASGFIFDDYAMSWVRQAPGKGLEW
VSSINWSGTHTDYAEDMKGRFTISRDNAKKTLYLQMNSLQSEDTAVYYCAKGWGPAVTSIPVATLGTQVTVSS
<27B3, SEQ ID NO: 2201; PRT; ->
EVQLVESGGGLVQAGGSLTLSCTASETTVRIRTMAWYRQPPGNQREW
VATIGSNGFATYPDSVKGRFTISRDNAKNTVYLQMNSLKPEDTAVYYCRDINRDIWGQGSQVTVSS
<27E5, SEQ ID NO: 2202; PRT; ->
EVQLVESGGGLVQAGGSLTLSCTASETTVRIRTMAWYRQPPGNQREW
VATIGSNGFATYPDSVKGRFTISRDNAKNTVYLQMNSLKPEDTAVYYCRDINRDIWGQGSQVTVSS
<27D6, SEQ ID NO: 2203; PRT; ->
EVQLVESGGGLVQAGGSLTLSCTASETTVRIRTMAWYRQPPGNQREW
VATIGSNGFATYPDSVKGRFTISRDNAKNTVYLQMNSLKPEDTAVYYCRDINRDIWGQGSQVTVSS
<30D10, SEQ ID NO: 2204; PRT; ->
EVQLVESGGGLVQAGGSLTLSCTASETTVRIRTMAWYRQPPGNQREW
VATIGSNGFATYPDSVKGRFTISRDNAKNTVYLQMNSLKPEDTAVYYCRDINRDIWGQGSQVTVSS
<47G11, SEQ ID NO: 2205; PRT; ->
EVQLVESGGGLVQPGGSLRLSCAASGRIFYPMGWFRQAPGKEREFVA
AIGSGDIITYYADSVKGRFTISRDNAKNTVYLQMNSLKPEDTAVYYCASSRDYSRSRDPTSYDRWGQGTQVTVSS
<27C3, SEQ ID NO: 2206; PRT; ->
EVQLVESGGGLVQPGGSLRLSCAASGFTFDDYATSWVRQAPGKGPEW
VSAINSGGGSTYYADSVKGRFTISRDNAKNTLYLQMNSLKPEDTAVYYCARPRGSSLYLLEYDYWGQGTQVTVSS

TABLE B-2

Preferred Nanobodies against HER2 obtained as described in Example 4
<Name, SEQ ID #; PRT (protein); ->

<11A101/1-120, SEQ ID NO: 2207; PRT; ->
EVQLVESGGGLVQAGGSLRLSCAASGRTFNAMGWFRQAPGKEREFVAAISRS
PGVTYYADSVKGRFTTSRDNAKNTVYLQMNDLKPEDTAVYYCAADFYLATLAHEYDYWGQGTQVTVSS
<11A22/1-122, SEQ ID NO: 2208; PRT; ->
EVQLVESGGGLVQAGGSLRLSCAASGRTFSSYAMAWFRQAPGTEREFIAGIRW
SDGSTYYADSVKGRFTISRDNAKNTVYLQMNSLKPEDTAVYYCAADFYVSTLAHEYDYWGQGTQVTVSS
<12D44/1-122, SEQ ID NO: 2209; PRT; ->
KVQLVESGGGLVQAGGSLRLSCAASGRTFSSYAMAWFRQAPGTEREFIAGIRW
SDGSTYYADSVKGRFTISRANAKNTVYLQMNGLKPEDTAVYYCAADFYVSTLAHEYDYWGQSTQVTVSS
<12E11/1-122, SEQ ID NO: 2210; PRT; ->
EVQLVESGGGLVQAGGSLRLSCAASGRTFSSYAMAWFRQAPGKEREFVGGIRW
SDGSTYYADSVKGRFTISRDNAKITVYLQMNSLKPEDTAVYYCAADFYVSTLAHEYDYWGQGTQVTVSS
<13G111/1-123, SEQ ID NO: 2211; PRT; ->
EVQLVESGGGLVQAGGSLRLSCAASGRTFSSYAMGWFRQAPGKERAFVAAIRW
SGGNTYYADSVKGRFTISRDNAKNTVYLQMNSLKPEDTAVYYCAADTFTLSTLSHEYDYWGQGTQVTVSS
<13F71/1-123, SEQ ID NO: 2212; PRT; ->
EVQLVESGGGLVQAGGSLRLSCVASGRTFSNYALAWFRQAPGKEREFVAAINW
RSGGSTYYADSVKGRFTISRDNAKNTVYLQMNSLKPEDTAVYYCAADLIVATLPGEYDYWGQGTQVTVSS
<14H61/1-122, SEQ ID NO: 2213; PRT; ->
EVQLVESGGGLVQAGGSLRLSCAASGRTFSRFAMGWFRQAPGKEREFVAAVRW
SDDYTYYADSVKGRFTISRDNAKNTVYLQMNSLSPEDTAVYYCAADEILATLPHEYDYWGQGTQVTVSS
<22B12/1-124, SEQ ID NO: 2214; PRT; ->
EVQLVESGGGLVQAGGSLRLSCAASGRTFSSYAMAWFRQAPGKEREFVAGINK
SGGITHSADSVKGRFTISRDNAKNTVYLQMNSLKPEDTAVYYCAADAYTVIATLPHEYDYWGQGTQTVSS
<14H71/1-123, SEQ ID NO: 2215; PRT; ->
EVQLVESGGGLVQAGGSLRLSCEASGLTISSLTMAWFRQAPGKEREFVANIK
WSGDRIVYADSVKGRFTISRDSAKNAVNLQMELVESDDTAVYYCAAKHSTVAGLTHEYDYWGQGTQVTVSS
<12D51/1-120, SEQ ID NO: 2216; PRT; ->
EVQLVESGGGLVQPGGSLRLSCAASGSAFSIKSMGWYRQAPGKQRELAAVII
SSGTTTYADSVKGRFTISRDSAKNTVYLQMDSLKPEDTAVYVCNAVYVSTWGNGYDYWGQGTQVTVSS
<11A111/1-126, SEQ ID NO: 2217; PRT; ->
EVQLVESGGGLVQAGGSLGLSCAAAGRTFSSSLMGWFRQAPGKEREFVAAIT
DNGGSTYYADSVKGRFTISRDNAKNSVYLQMNSLKPEDTAIYYCAARRSGYYSLSTSPHQYAYWGQGTQVTVSS
<13G71/1-124, SEQ ID NO: 2218; PRT; ->
EVQLVESGGGLVQAGGSLRLSCAASGRAFSSYAMGWFRQAPGKERDFVAAIT
SSGSTNYADSVKGRFTISRDNAKNTVYLQMNSLKPEDTAVYYCGARVNYAAYSRLEHDYHYWGQGTQVTVSS
<13G74/1-125, SEQ ID NO: 2219; PRT; ->
EVQLVESGGGLVQAGGSLRLSCATSGRTFSTYASMGWFRQTPGKEREFVAAI
TSSGSTNYADSVKGRFTISRDNAKNTVYLQMNSLKPEDTAVYYCGARVNYAAYSRLEHDYHYWGQGTQVTVSS
<11A71A/1-116, SEQ ID NO: 2220; PRT; ->
EVQLVESGGGLVQPGGSLRLSCAASGNIDGIITMGWYRQRPGKPREWVGTIN
SGGDTNYAGSVKGRFTIARDDAKNTMYLQMNGMKPEDTAVYYCKMNRAGIYEYWGQGTQVTVSS
<22B101/1-123, SEQ ID NO: 2221; PRT; ->
EVQLVESGGGLVQTGGSLRLSCAASGPTFSDYAIGWFRQAPGKEREFVAAIS
SSGISTIYGDSVKGRFDISRDNAKNTVYLQMNRLKPEDTAVYYCAARLFMATPNQGQYYYWGQGTQTVSS
<11B42/1-123, SEQ ID NO: 2222; PRT; ->
EVQLVESGGGLVQAGDSLRLSCAARSGFTFSNHIMGWFRQAPGKERELIAEI
TWNGGSTYYADSVKGRFAISRDNALNTVYLQMNSLKPEDTAVYYCAARPSYSTNNVKSYRYWGQGTQVTVSS
<13E111/1-124, SEQ ID NO: 2223; PRT; ->
EVQLVESGGGLVQAGSSLRLSCALSGRTFSDYAIGWFRQAPGKEREFVAAIS
GWSGGTTNYADSVKGRFTISRDNGKNTVDLRMNSLKPEDTAVYYCAARPAVVHTRKESYPYWGQGTQVTVSS
<14H12/1-125, SEQ ID NO: 2224; PRT; ->
EVQLVESGGGLVQAGGSLRLSCIASERTFSSAGVGWFRQAPGKERDFVAAIS
WNGVTIYYADSVKGRFTISRDNAKNTVYLQMNSLKPEDTAVYYCAARINYSVLTTTSSSYHYWGQGTQVTVSS
<13G101/1-123, SEQ ID NO: 2225; PRT; ->
EVQLVESGGGLVQPGDSLRLSCSASEGTLSRSRVAWFRQAPGKEREFVTVI
SGVGTSYADSVKGRFTISRDDAKNTVYLQMNSLKAEDTAIYYCAADFRSTWLSSSGSSYTYWGQGTQVTVSS
<13G41/1-121, SEQ ID NO: 2226; PRT; ->
EVQLVESGGGLVQPGGSLTLSCVGSGRRFSADVMGWYRQAPGKQREFVASI
SSGSAINYADSVKGRFTVSRDNAQNTVYLQMNSLKIEDTGVYYCNARRIVNVEGAYRDYWGQGTQVTVSS
<22B910/1-121, SEQ ID NO: 2227; PRT; ->
EVQLVESGGGLVQPGGSLPLSCAASGSIFRMNDMGWYRQAPGKQRERVATL
TSAGNTNYADSVKGRFTISGDDARNTVYLQMNSLNPEDTAVYYCNAKVVVAVEGAKYDYWGQGTQVTVSS
<21A81/1-122, SEQ ID NO: 2228; PRT; ->
EVQLVESGGGLAQAGGSLRLSCAVFGRSRYGMAWFRRAPGKEREFVAGIAW
NGASIGSADSVRGRFTISRDNSENTVYFEMGSLKPEDTAVYYCAICRISWCAGAESDYGYWGQGTQVTVSS
<21A92/1-127, SEQ ID NO: 2229; PRT; ->
EVQLVESGGGQVQAGGSLRLSCTESGRAFNTRAMGWFRQAPEKEREFVAGI
TMSGFNTRYADSVKGRFTISRDNAKGTVYLQMSSLKPEDTAVYYCAADSITDRRSVAVAHTSYYYWGQGTQVTVSS
<22C712/1-123, SEQ ID NO: 2230; PRT; ->
EVQLVESGGGLVQAGGSLGLSCAASGRTFSNYAMGWFRQAPGKEREFVAGI
SWSGGHTFYADSVKGRFTISRDNTKNTVYLQMNSMRPEDTAVYYCAARLSSVAVASTRYDYWGQGTQVTVSS
<11A13/1-125, SEQ ID NO: 2231; PRT; ->
EVQLVESGGGLVQAGDSLRLSCVASGGTFGSYAMGWFRQAPGKEREFVATI
DWSGDTAFYADSVKGRFTISRDIANDVVYLQMNSLEPEDTAVYYCARNRQSGVASENLRLYTYWGQGTQVTVSS
<13G93/1-123, SEQ ID NO: 2232; PRT; ->
EVQLVESGGGLAQAGDSLRLSCVDSGSSFSAYAMGWFRQAPGKEREFVAAV
SWDGRNTYYADSVKGRFTISRDNAKNTLYLQTTSLRPEDTGVYYCAEDKQSGVSVNPKYAYWGQGTQVTVSS
<12C52/1-118, SEQ ID NO: 2233; PRT; ->
EVQLVESGGGLVQAGGSLRLSCAVSGGTFESDTMAWFRQAPGKEREFVARV
SWIRTTYYSDSVKGRFTISKDNAKNTVYLQMNSLKPEDTAVYYCAAQTLGRSLYDYWGQGTQVTVSS
<12C61/1-126, SEQ ID NO: 2234; PRT; ->
EVQLVESGGGLVQAGGSLRLSCAASGRTFSSNAMAWFRQAPGNERELVSAI
GWSGASTYYIDSVEGRFTISRDNAKNTVYLQMNSLKPEDTAVYYCAASRYSGGVATARRSEYHYWGQGTQVTVSS
<21A61/1-125, SEQ ID NO: 2235; PRT; ->
EVQLVESGGGLVQAGDSLRLSCVASGDSFNTYTMGWFRQAPGKEREFVAAI
RWSGGTTFYGDSVKGRFTISRDYAKNTWYLQMNTLKPEDTAAYYCAAVATYSRNVGSVRNYDYWGQGTQVTVSS
<11A121/1-126, SEQ ID NO: 2236; PRT; ->
EVQLVESGGGLVQAGGSLRLSCVVSEGTFSSYSMGWFRQAPGKDREFVSAI
TWNGTRTYYRDSVKGRFTISRDNAKNTVQLQMNSLKPEDTAVYYCAVSQPLNYYTYYDARRYDYWGQGTQVTVSS
<11A91/1-124, SEQ ID NO: 2237; PRT; ->
EAQLVESGGGLVQAGGSLRLSCTASGRTYSTIMGWFRQAPGKEREFVAAIR
WSGGSAFYADSVKGRFTISRDNAKNTVYLQMTSLMPEDTAVYYCADTPVYYQRYYDQNAYDYWGQGTQVTVSS
<13G72/1-118, SEQ ID NO: 2238; PRT; ->
EVQLVESGGGLVQAGGSLRLSCAASGRAFSSYAMGWFRQAPGKERDFVAAI
TSSGSTNYADSVKGRFTISRDNAKNTVYLQMNSLKPEDTAVYYCAAKYYSYYAYDYWGQGTQVTVSS
<13E81/1-124, SEQ ID NO: 2239; PRT; ->
EVQLVESGGGLVQAGGSLRLSCAASGGTFSVYHMAWFRQAPGKEREFVAAI
RSSGGLFYALSVSGRFTISRDNAKDTMYLQMNVLKPEDTAVYYCAASPVYYIDYSSQYKYGYWGQGTQVTVSS
<11B31/1-124, SEQ ID NO: 2240; PRT; ->
EVQLVESGGGLVQAGGSLRLSCAASGGAFGVYHMGWFRQAPGKEREFVAAI
RSGGTTLYEDSVKGRFTISRDNAKNTVYLRMNSLKPEDTAVYYCATQIYYRTNYYSQNAYDYWGQGTQVTVSS
<13G81/1-124, SEQ ID NO: 2241; PRT; ->
EVQLVESGGGLVQAGGSLRLSCAASGGTFGVYHMGWFRQAPGKEREFVAVI
RSGGTTLYADSVKGRFTISRDDAKNTVYLQMNSLKPEDTAVYLCAAQIYYRTNYYSQNNYDYWGQGTQVTVSS
<21A53/1-124, SEQ ID NO: 2242; PRT; ->
EVQLVESGGGLVQAGGSLELSCAASGGAFGVYHMGWFRQAPGKEREFVAAI
RSGGTTLYEDSVKGRVTISRDDAKNTVYLRMNSLKPEDTAVYYCAAQIYYRTNYYSQNVYDYWGQGTQVTVSS
<14H51/1-124, SEQ ID NO: 2243; PRT; ->
EVQLVESGGGLVQAGGSLRLSCAASGGTFGVYTMAWFRQAPGKEREFVAAI
RSGATTLYEDSVKGRFTISRDDAKNTVYLRMNSLKPEDTAVYYCAAQIYYRTNYYSQNEYDYWGQGTQVTVSS
<21A21/1-124, SEQ ID NO: 2244; PRT; ->
EVQLVESGGGLVQAGGSLRLSCAASGGTFGVYHMGWFRQAPGTEREFVAVI
RSGGTTLYEDSVKGRFTISRDNAKNTVYLRMNSLKPEDTAVYYCAAQIYYRTNYSSQSNYDYWGQGTQVTVSS
<21A111/1-124, SEQ ID NO: 2245; PRT; ->
EVQLVESGGGLVQAGGSLKLSCAVSGRTIVPYTMAWFRQAPGKEREFVAV
TRSGGTTFYADSAKGRFTIARDDAKNTVYLQMNSLKPEDTAVYYCALATAYRTNYSSRDKYDYWGQGTQVTVSS
<22B1212/1-122, SEQ ID NO: 2246; PRT; ->
EVQLVESGGGLVQPGGSLRLSCAASGFTFSSYAMSWVRQAPGKGLEWVSAI
NSGGGSTSYADSVNGRFTISRDNAKNTLYLQMNSLKPEDTAVYYCAKYLSFYSDYEVYDYWGQGTQVTVSS
<11A31/1-120, SEQ ID NO: 2247; PRT; ->
EVQLVESGGGLVQAGGSLRLSCAASGGTFSSGVMAWFRQSPGEEREFLALI
TRNGETKKTADSVKGRFTISRDNAKNGVSLQMDSLKAEDTAVYYCASDPTYGSGRWTYWGQGTQVTVSS
<13E51/1-128, SEQ ID NO: 2248; PRT; ->
EVQLVESGGGLNQAGGSLRLSCAASRHTFSGYAMGWFRQAPGKEREFVAAI
RWSGGITYYADSVKGRFTISSDNAKNTVYLQMNSLKPEDTALYYCARSVTYYSGSHAYTQEGGYARWGQGTQVTVSS
<12D121/1-126, SEQ ID NO: 2249; PRT; ->
EVQLVESGGGLVQTGGSLRLSCAASGRAFSTYGMGWFRQAPGKAREFVAAI
SRSGTGTYYAGSMKGRFTISRDDAKNTVYLOMNSLKPEDTAVYYCAARQPYASGSHYSSTQYTYWGQGTQVTVSS
<13F121/1-119, SEQ ID NO: 2250; PRT; ->
EVQLVESGGGLVQAGGSLRLSCAASGRSFNDYTMGWFRQTPGKEREFVARV
WWNGGSAYYADSVKGRFTISIDNAKNTVYLQMNNLTPEDTAVYYCAALYRGRSVYDDWGQGTQVTVSS
<13G121/1-127, SEQ ID NO: 2251; PRT; ->
EVQLVESGGGLVRAGTSLRLSCADSARTFSSAAMGWFRQAPGKEREFVSAI
SPIGSSKYYADSVKGRFTISRDNAKNTVYLQMDSLKPEDTAVYYCAASSYGSTYYSQGRAYYYDYWGQGTGVTVSS
<22B41/1-124, SEQ ID NO: 2252; PRT; ->
EVQLVESGGGLVQPGGSLRLSCTVFGRTFSGDVIGWFRQAPGKEREFVAAI
STSGGGTDSADSVKGRFTISKENAKNTVYLQMTILKPEDTAVYYCASSPYGPLYRSTHYYDYWGQGTQVTVSS
<12D71/1-125, SEQ ID NO: 2253; PRT; ->
EVQLVESGGGLVQAGGSLGLSCAASGRTVSTMGWFRQAPGKEREFVTAITW
SGDSTNFADSVKGRFTISRDSAKDTVYLQMNNLKPEDTAVYYCAATTYYSGSYISTLSTSYNYWGQGTQVPVSS
<13F42/1-111, SEQ ID NO: 2254; PRT; ->
EVQLVESGGGLVQAGGSLRLSCVASGRTLSTTGVGWFRQAPGKGRESVATI
FVGGTTYYSDSVKGRFTISRDNAKNAVNLQMSNLKPEDTALHYCTICSYRGQGTQVTVSS
<12C101/1-111, SEQ ID NO: 2255; PRT; ->
EVQLVESGGGLVQAGGSLRLSCVASGRTLSTTGVGWFRQAPGKERESVATI
FVGGTTYYSDSVKGRFTISRDNARNAVNPQMNNLKPEDTAVYYCTIGSYRGQGTQVTVSS
<14H91/1-127, SEQ ID NO: 2256; PRT; ->
EVQLVESGGGLVQAGGSLRLSCAASGRTFSRDVMGWFRQAPGKEREFVAAK
TWSGASTYYADSVRGRFTISRDNAKNAVYLQMNSLKPEDTAVYYCAARDSSTLDSTYYVGGSYNYWGRGTQVTVSS
<13F41/1-111, SEQ ID NO: 2257; PRT; ->
EVQLVESGGGLVQAGGSLRLSCVASGRTLSTTGVGWFRQAPGKERESVATI
FVGGTTYYSDSVKGRFTISRDNAKNAVNLQMSNLKPEDTALYYCTIGSYRGQGTQVTVSS
<14H21/1-125, SEQ ID NO: 2258; PRT; ->
EVQLVESGGGLVQGGSLRLSCVRSGGYFGSYHIGWFRQAPGNEREFVAAI
TWNGASTSYADSVKGRFTISRSIAENTVYLQMNKVKPEDTAVYYCAARMYGSDWLPRPEDFDSWGQGTQVTVSS
<22B610/1-120, SEQ ID NO: 2259; PRT; ->
EVQLVESOGGLVQPGGSLRLSCAASGSIFSINAMGWYRPAPOKQRELVARI
TSTGSTNYADSVKGRFTISRDNAKNTVYLQMNSLKPEDTAVYYCNADVSPSYGSRWYGWGQGTQVTVSS
<12C32/1-127, SEQ ID NO: 2260; PRT; ->
EMQLVESGGGLVQAGGSLRLSCATSERTFSTYTMAWFRQAPGKEREFVVAI
KSSDNSTSYRDSVKGRFTISRDNAKSTMYLQMNSLKPEDTAVYYCAARREYSTIYTARYPGEYVYWGQGTQVTVSS
<12D61/1-116, SEQ ID NO: 2261; PRT; ->
EVQLVESGGGLVQPGGSLRLSCAASRSIFSPNVVGWYRQAPGKQRELVAAV
TSGGITNYADSVKGRFTISRDNAKNTLYLQMNSLKAEDTAVYYCNARERGIYDSWGQGTQVTVSS
<13G31/1-125, SEQ ID NO: 2262; PRT; ->
EVQLVESGGGLVQAGGSLRLSCAASGGTFSRYKMGWFRQAPGKEREFVAAS
RWSGGIKYHADSVKGRFTISRDDAKNSIYLQMNTLKPEDTAVYYCAADDYLGGDNWYLGPYDSWGQGTQVTVSS
<22C65/1-124, SEQ ID NO: 2263; PRT; ->
EVQLVESGGGLVQAGGSLRLSCAVSGFLFDSYAMGWFRQAPGKEREFVAAI
RWSGSATDYSDSVKGRFTISRDNAKNTVYLQMNSLIPEDTAVYYCAARKTYRSLTYYGEYDSWGQGTQVTVSS
<11A71/1-125, SEQ ID NO: 2264; PRT; ->
EVQLVESGGGLVQPGGSLRLSCAASRSIRSVSVMGWYRLAPGNQRELVATI
TADGITNYADSVKGRFTVSRDNGRNTVYLQMNSLKPEDTAVYYCNVDRLLYYSSGYYQTSVDVWGQGTQVTVSS
<11B91/1-125, SEQ ID NO: 2265; PRT; ->
EVQLVESGGALVQPGGSLRLSCAASGSIRSINTMGWYRQAPGNQREFVAAV
TEGGTTSYAASVKGRFTISRDKAKNTVLLQMDSLKPEDTAVYYCNADRFLYYSAGRYDTGSDIWGQGTQVTVSS
<11A81/1-125, SEQ ID NO: 2266; PRT; ->
EVQLVESGGALVQPGGSLRLSCAASDSIRSINIMGWYRQAPGKQREFVAAV
TEDGSINYAESVKGRFTISRDKAKNALYLQMNSLKPEDMAVYYCNADRVLYYSDSRYYTGSNYWGQGTQVTVSS
<11B121/1-127, SEQ ID NO: 2267; PRT; ->
EVQLVESGGGLVQPGGSLRLSCAASGSSASINTMGWYRQAPGEQRELVAEI
TEGGIINYTDSVKGRFTISRDNAKNTVYLEMNNLKPEDTAVYYCNADRALYRNYSDGRYYTGYDYWGQGTQVTVSS
<12D31/1-115, SEQ ID NO: 2268; PRT; ->
EVQLVESGGGLVQPGGSLRLSCAASRNIFDFNDMGWYRQGPGKEREFVALI
NVGGVAKYEDSVKGRFTISRDNAENTVYLQMNNLKPEDMAVYYCNARILSRNYWGQGNQVTVSS
<11B51/1-127, SEQ ID NO: 2269; PRT; ->
EVQLVESGGGLVQAGGSLRLSCAASGGTFSGRGMGWFRQAPGKEREFVAAV
SWSGGNTYYADSVKGRFTISRDNAKSTVYLQMDSLKPEDTAVYYCAASRRFYSGLYYYTDDAYEYWGQGTQVTVSS
<13G51/1-127, SEQ ID NO: 2270; PRT; ->
EVQLVESGGGLVQAGGSLSLSCAASGGTFNGRAVGWFRQAPGEEREFVTGI
SWSGGSTDYADSVKGRFTISRDNSKNTVSLQMNSLKPEDTAVYYCAASRRFYSGLVYYSVDAYENWGQGTQVTVSS
<13F82A/1-130, SEQ ID NO: 2271; PRT; ->
EVQLVESGGGLVQAGGSLRLSCAISGRTLSGRAMGWFRQAPGKEREFREF
VAATSWSGGSKYVADSVTGRFTIFRDNAENTAYLQMNSLNPEDTAVYYCAVTKRYYSIKYYSTVEDYEYWGQGTQVTVSS
<13E101/1-128, SEQ ID NO: 2272; PRT; ->
EVQLVESGGGLVQAGGSLRLSCAVSGRTFNNDHMGWFRQAPGTERELVAAT
GRRGGPTYYADSVKGRFTISRDNAESTVYLQMNSLKAEDTAVYYCAANRYYCSTYGCLSTPRQYDYWGQGTQVTVSS
<22B85/1-120, SEQ ID NO: 2273; PRT; ->
EVQLVESGGGLVRPGGSLRLSCATSGSDIGINAMGWYRQAPGNQRELVATI
TGSTGTTYADSVKGRFAISRDGAKNTVYLQMDSLKPEDTAVYYCNLRVYTGTYGGRNYWGQGTQTVSS
<11B12/1-118, SEQ ID NO: 2274; PRT; ->
EVQLVESGGGLVQAGGSLRLSCAASGRALINYAMGWFRQAPGKEREFVSAI
NWSGSHTDYGDSVKGRFAISRDNAKNTVYLQMHSLKPEDTAVYHCATGYSLPAFDSWGPGTQVTVSS
<13G61/1-118, SEQ ID NO: 2275; PRT; ->
EVQLVESGGGVVQAGGSLRLSCAPSGRTFSSYVMGWVRQAPGKAREFVAGI
TRNSGRTRYADSVKGRFTISRDNADNTVTLQMNSLKPEDTAVYYCAGGIDLYTFHYFGQGTQVTVSS
<14H41/1-118, SEQ ID NO: 2276; PRT; ->
EVQLVESGGGLVQAGGSLRLSCAPSGRTFSSYVMGWVRQAPGKAREFVAGI
TRNSIRTRYADSVKGRFTISRDNADNTVTLQMNSLKPEDTAVYYCAGGIDLYTFDYFGQTQVTVSS
<11B81/1-126, SEQ ID NO: 2277; PRT; ->
EVQLVESGGGLVQGGSLRLSCAASGRPVNNYIMGWFRQALGQGREFVAAI
NRNGATAAYADSVKGRFTISRDNAEDLLYLQMNLLKPEDTAVYYCAANSDSGFDSYSVWAAYEYWGQGTQVTVSS
<11C11/1-121, SEQ ID NO: 2278; PRT; ->
EVQLVESGGGLVQAGGSLRLSCAASGRTFSAYAMGWFRQAPGKERESVATI
RWTGGSSSTSYADSVKGRFTISKNTAENTVYLQMNSLKPEDTAVYYCAVLLTVWDTYKYWGQGTQVTVSS
<12D92/1-123, SEQ ID NO: 2279; PRT; ->
EVQLVESGGGLVQAGGSLRLSCAASGRTYNMAWFRQAPGKEREFVAAMNWS
GGSTKYAESVKGRFTISRANDNNPLYLQMNTLKPEDTAVYYCAATNRWYTGVYDLPSRYEYWGQGTQVTVSS
<13E61/1-123, SEQ ID NO: 2280; PRT; ->
EVQLVESGGGLVQAGGSLRLSCTASGQTFNMGWFRQAPGKEREFVAAISWS
QYNTKYADSVKGRFTISRDNAINSLYLQMDTLKPEDTAVYYCAATNRWFSAVYDLPSRYTYWGQGTQVTVSS
<22B71/1-114, SEQ ID NO: 2281; PRT; ->
EVQLVESGGAFVQGGSLRLSCAASGSDVWFNVMGWYRQGPGQQLELVASI
TYGGNINYGDPVKGRFSISRDNALKTVYLQMNSLKPEDTAVYYCYADLPSRLWGQGTQVTVSS
<21A121/1-123, SEQ ID NO: 2282; PRT; ->
EVQLVESGGGLVQAGGSLRLSCTASGRAFNMGWFRQAPGKEREFVAGVNWG
GGSTKVADSVKERFTISRDYDNSPVYLQMNTLKPEDTAVYYCAATSRWYSAVYDLPTRYDYWGQGTQVTVSS
<13F101/1-124, SEQ ID NO: 2283; PRT; ->
EVQLVESGGGLVQAGGSLRLSCQLSGGTVSDLHMGWFRQAPGKEREFVGFT
RWPSITYIAEHVKGRFTISRDNAKNTVYLQMNSLEREDTAVYYCAADRSYSIDYRHADSYSYWGQGTQVTVSS
<11A43/1-123, SEQ ID NO: 2284; PRT; ->
EVQLVESGGGLVQAGGSLRLSCAASGSIFRVNHMGWYRQAPGKQREFVAAI
TSDHITWYADAVKGRFTISRDNAHNTVTLQMNSLRPEDTAVYYCAADPLLFYGVGSADVDYWGQGTQVTVSS
<12C81/1-117, SEQ ID NO: 2285; PRT; ->
EVQLVESGGGLVQPGGSLRLSCAGSGNIVRDNTMAWYRQAPGNQRDLVATI
NVGGGTYYAGPVKGRFTISRDNAKNSVYLQMNSLKPEDTSVYYCNVISGLVQRDYWGQGTQVTVSS
<11B21/1-124, SEQ ID NO: 2286; PRT; ->
EVQLVESGGGLVQAGGSLRLSCAASGRTFSMYLMGWFRQAPGKEREFVSTI
NRRGGNTYYADSVKGRFTISRDNARNTVYLQMNSLKPEDTAVYYCAAGGHLLGYDVQWEPDYWGQGTQVTVSS
<11B71/1-126, SEQ ID NO: 2287; PRT; ->
EVQLVESGGGLVQAGGSLRLSCAASGRTFERYAMGWFRQAPGKEREFVATI
SWSGGRDTVYADSVKGRFTISRDNAKNTVYLQMNSLKPEDTAVYYCAAHKRTYELGAHSTDFGSWGQGTQVTVSS
<12C121/1-126, SEQ ID NO: 2288; PRT; ->
EVQLVESGGDLVQPGESLRLSCAVSGVTVDYSGIGWFRQAPEKEREAVSCI
ESGDCTTTYVDSVKGRFTISRDNAKNAVYLQMNSLKPEDTGVYYCATAVFVDSGDFSVCRGVGYWGKGTQVTVSS
<22C51/1-121, SEQ ID NO: 2289; PRT; ->
EVQLVESGGGLVQAGASLRLSCAASGRTFSRYDIGWFRQAPGKGREFVAAI
NWSGGTTSFGDSVKGRFTISRDNAKNTVYLQMNSLKPEDTAVYYCAALRSWPRGVDSGSWGQGTQVTVSS
<12D11/1-123, SEQ ID NO: 2290; PRT; ->
EVQLVESGGGLVQTGGSLRLSCAASGRTFSGSRMGWFRQAPGKEREFVAAI
RWSGGITWYAESVKSRFTISRDNTKNTIDLQINSLKPEDTAVYYCAADVIYKNIGSGSFDYWGQGTQVTVSS
<12D14/1-123, SEQ ID NO: 2291; PRT; ->
EVQLVESGGGLVQAGGSLRLSCAASGRTFSGSRMGWLRQAPGKEREFVAAV
RWSGGITWYAESVKGRFTISRDNTKNTIDLQINSLKPEDTAVYYCAADVIYKNIGSGSFDYWGQGTQTVSS
<12C111/1-123, SEQ ID NO: 2292; PRT; ->
EVQLVESGGGLVQAGGSLRLSCAVSGLTFSSYAMGWFRQAPGKVREFVATI
SRSGGRTSYADSVKGRFIVSRDNAKNTADLQMNDLKPEDTAVYYCGASKWYGGFGDTDIEYWGQGTQVTVSS
<22B55/1-123, SEQ ID NO: 2293; PRT; ->
EVQLVESGGGLVQAGGSLRLSCAVSGLTFSTYAMGWFRQAPGKVREFVATI
SRSGGRTSYADSVKGRFIVSRDNAKNTADLQMNELKPEDTAVYYCGASKWYGGFGDTDIEYWGQGTQVTVSS
<14H121/1-113, SEQ ID NO: 2294; PRT; ->
EVQLVESGGGLVQPGGSLRLSCAASGITFRFKAMGWFRQGPGKRRELVARI
AGGSTNYADSVKGRFTISRDDAKNTVFLQMNSLKPEDTAVYYCNVDGPFGNWGQGTQVTVSS
<12C71/1-125, SEQ ID NO: 2295; PRT; ->
EVQLVESGGGLNQAGGSLRLSCTASGGTFGSYALGWFRQSPGKERESVAAI
DWDGSRTQYADSVKGRFTISRENVKDTMYLQMNSLQAEDTGVYYCVRSRHSGNTLSFSLKYDYWGQGTQVTVSS
<21A31/1-125, SEQ ID NO: 2296; PRT; ->
EVQLVESGGGLVQAGGSLRLSCAASEPTFSSVAMGWFRQGPGKEREFAATI
TWSGDSTYVTDSVKGRFTISRDNARNTAYLQMDSLRPEDTAVYSCAARRWSGTLSLFDNEYYYWGQGTQVTVSS
<12C91/1-121, SEQ ID NO: 2297; PRT; ->
EVQLVESGGGLVQAGGSLRLSCVASGRTSSYYHMAWFRQAPGKEREFIAAI
NLSSGSTYYPDSVKGRFTISRGNAKNTVNLQMNSLKPEDTAVYYCAADNYRDSYLEYDYWGQGTQVTVSS
<14H91/1-125, SEQ ID NO: 2298; PRT; ->
EVQLVESGGGLVQAGGSLSLSCAASGRTFSNYRMAWFRQAPRKEREFVAAI
SRSGESTYFADSMKGRFTISRDNTESTGYLQMNNLKPEDTAVYYCAASWDHGDYVDGGFFYDYWGQGTQVTVSS
<12C42/1-124, SEQ ID NO: 2299; PRT; ->
EVQLVESGGGLVQAGGSLRLSCAASGRTFSRYAMHWFRQAPGSERDFVAGI
SWDGGSTFYANSVKGRFTISRDNAKNMVYLQMNSLKPEDTAVYYCAAAGSAGPPSIDRQYDYWGQGTQVTVSS
<12D102/1-118, SEQ ID NO: 2300; PRT; ->
EVQLVESGGGLVQPGGSLRLSCAASGSSLSFNAMGWSREAPGKRRELVARI
ISDDSTLYADSVKGRFTISRDYAKNTAYLQMNSLKPEDTAVYYCVADVRDSIWRSYWGQGTQVTVSS
<11A52/1-120, SEQ ID NO: 2301; PRT; ->
EVQLVESGGGLVQAGGSLRLSCAASGRALSNYAMRWFRQAPGKEREFVATI
NWSGSHTDYADSVKGRFTISRDNAENTVYLQMNSLTPEDTAVYYCASGWGATQAQSGFWGQGTQVTVSS
<14H111/1-120, SEQ ID NO: 2302; PRT; ->
EVQLVESGGGLVQAGGSLRLSCAASGRALISFAMRWFRQAPGKEREFVAAI
NWSGTHTDYADSVKGRFTISRDNAENTVYLLMNSLIPEDTAVYYCATGWGATQAQHGFWGQGTQVTVSS
<11B61/1-120, SEQ ID NO: 2303; PRT; ->
EVQLVESGGGLVQAGGSLRLSCAASGRTSSGYGMGWFRQAPGKEREFVAAV
GWYGSTYFADSVKGRFTIYRDNAQNTMYLQMNSLKPEDTAVYYCAASSSLATISQPSSWGQGTQVTVSS
<12E42/1-118, SEQ ID NO: 2304; PRT; ->
EVQLVESGGGLVQPGGSLRLSCAHSGRAFSLRTMGWYRQAPGNQRELVALI
SAGDSTYYPDSVKGRFTVSRDNAKNTVYLQMNSLKPEDTAVYYCNAKAVTSRDHEYWGQGTQVTVSS
<13F81A/1-128, SEQ ID NO: 2305; PRT; ->
EVQLVESGGGLVQAGGSLRLSCAASGRTFSRYAMGWFRQAPGKEREFVAAI
SWTGGSSYYGDSVKGRSTISRENAENTVYLQMNSLKPEDTAVYYCAANS
DEFYSGTLKLQSRMVEYWGQGTQVTVSS
<11B102/1-118, SEQ ID NO: 2306; PRT; ->
EVQLVESGGGLVQAGGSLRLSCAASGGIFSSHAISWFRQAPGKAREFVA
AINWSGSHRDYADSAKGRFTISRDNAKKTAYLQMNSLRPEDTAVYYCVGGWKTDEYVKWGQGTQVTVSS
<21A41/1-120, SEQ ID NO: 2307; PRT; ->
EVQLVESGGGLVQAGGSLRLSCAASGRIFSNYAWSWFRQAPGKERGFVA
AINWSGGYTDYADSVKGRFTISRDNTKNTVYLQMNSLKPEDTAVYYCRPGWVTPSYEYGNWGQGTQVTVSS
<14H101/1-128, SEQ ID NO: 2308; PRT; ->
EVQLVESGGGLVQAGGSLRLSCAASGRTFISSPMGWFRQAPGKEREVVA
ATTRSGGLPYYSDSVKGRFTISRDNAKNTVDLQMSSLKPEDTAAYYCAADQKYGMSYSRLWLVSEYEYWGQGTQVTVSS
<12E21/1-115, SEQ ID NO: 2309; PRT; ->
EVQLVESGGGLVQPGGSLRLSCAASGSIDSIHVVGWYRKAPGKQREVVA
YIGTAGATHYADSVKGRFTISRDNAENLVYLQMNNLKPEDTAVYYCSAGWGDSAYWGQGTQVTVSS
<13F21/1-123, SEQ ID NO: 2310; PRT; ->
EVQLVESGGGLVQSGGSLRLSCVASGTIVSINATSWYRQAPGNQRELVA
TIIGDGRTHYADSVKDRFTISRDAAANLVYLQMNSLKPSDTAIYSCNANGIESYGWGNRHFNYWTVGTQVTVSS
<12E33/1-119, SEQ ID NO: 2311; PRT; ->
EVQLVESGGGMVQAGGSLRLSCAASGLTLSNYGMGWFRQAPGKEREFVS
SINWSGTHTYDADFVKGRFIISRDNAKNTVYLQINSLKPEDTAVYYCAAGGWGTGRYNYWGQGTQVTVSS
<13G11/1-122, SEQ ID NO: 2312; PRT; ->
EVQLVESGGGLVQAGGSLRLSCAASGRTFISNYAMGWFRQAPGKEREFV
ATINWSGSHSDYADSVKGRFTISRDNAKNTVYLQMNNLKSEDTAVYYCAPGWGTAPLSTSVYWGQGTQVTVSS

TABLE B-3

Nanobodies against HER2 obtained as described in Example 4
<Name, SEQ ID #; PRT (protein); ->

<118N121_A1_4_OK/1-127, SEQ ID NO: 2113; PRT; ->
EVQLVESGGGFVQTGGSPRLSCAASGRSFSEYAAAW
FRQSPGKERDLVAGIMWDGRSLFYADSVKGRFTISRDNAKNTLHLQMNS
LKPEDTAVYYCAYHKTPYTTLELNRPHAFGSWGQGTQVTVSS
<118N121_A6_2_OK/1-123, SEQ ID NO: 2313; PRT; ->
EVQLVESGGGLVQAGGSLRLSCVASGRTFSGYSVGW
FRQSPGKEREFVGGINWSGRTYYVDSVKGRFTFSRDNAKNTVYLQMNSLKPEDT
AIYLCAVDRFNTIANLPGEYDYWGQGTQVTVSS
<118N121_B8_1_OK/1-135, SEQ ID NO: 2314; PRT; ->
EVQLVESGGGLVQDGGSLRLSCAASGQLANFASYAMGWFRQAPGKA
REFVAAIRGSGGSTYIADPARSTYYADFVKGRFTISRDNAKNTVYLQMNSLKPEDTAVYYCACETFN
SISNLPGEYDYWGQGTQVTVSS
<118N121_A2_2_OK/1-124, SEQ ID NO: 2315; PRT; ->
KVQLVESGGGLVQAGGSLRLSCAASGRTFSNYSVGWFRQAPGKEREFVA
ALSKDGARTYYAASVKGRFTIYRDNAKNVVYLQMSVLNGEDTAVYYCAADHFTFMSNLPSEYDYWGQGTQVTVSS
<118N121_A8_2_OK/1-124, SEQ ID NO: 2316; PRT; ->
EVQLVESGGGLVQAGGSLTLSCVISGLTLESHAMGWFRQAPGEEREF
VATIRWSGSATFYSDSVKGRFTISRDNAKNTVYLQMNSLKPEDTAVYYCAARKIYRSLSYYGDYDSWGQGTQVTVSS
<118N121_B3_1_OK/1-123, SEQ ID NO: 2317; PRT; ->
EVQLVESGGGLVQPGGSLRLSCAASGRTFSDLALGWFRRAPGKERE
HVAAISSSGVTTIYADSVRGRFTISRDEAKNTVYLEMNSLKTDDTAVYYCAARLTMATPNQSQYYYWGQGTQVTVSS
<118N121_A5_2_OK/1-114, SEQ ID NO: 2318; PRT; ->
EVQLVESGGGSVQPGGSLRLSCVASGSISSTNAMGWHRQVSGKERE
LVAIVTDGFTNYADFAKGRFTISRDNAKTTVYLQMNSLQPEDTARYYCRYSGIGTDNWGQGIEVTVSS
<118N121_A9_2_OK/1-114, SEQ ID NO: 2319; PRT; ->
EVQLVESGGGSVQPGGSLRLSCVASGSISSVNAMGWHRQVPGKQRE
LVAIVTDGFTNYADFAKGRFTISRDNAKTTVYLQMNSLQPEDTARYYCRYSGIGTDNWGQGIEVTVSS
<118N121_A7_1_OK/1-122, SEQ ID NO: 2320; PRT; ->
EVQLVESGGGLVQPGGSLRLSCAASGNIKSIDVMGWHRQAPGKERE
LVSDISFGGNTNYANSVKGRFTISRDNAKNTVYLQMNSLKPEDTAVYYCYADILYKTDITYYRNDFWGQGTQVTVSS
<118N121_A10_1_OK/1-131, SEQ ID NO: 2321; PRT; ->
EVQLVESGGGLVQAGGSLRLSCAASGFSFADYAIGWFRQAPGKEREGVSCIANSE
GTKYYADSAQGRLPISSDNAKKTVYLQMDSLKPEDTAVYYCAALPYTICPVVVKKGAVYYGVDDYWGKGTQVTVSS
<118N121_A11_1_OK/1-120, SEQ ID NO: 2322; PRT; ->
EVQLVESGGGLVQPGGSLRLSCAASGFPFGMYGMRWVRQAPGKGPERVSSINSDG
DTTYYADSVKGRFTISRDNDENMLYLQMNSLKPEDTAVYYCATGFSDRSFAVTHKGQGTQVTVSS
<118N121_B7_4_OK/1-124, SEQ ID NO: 2323; PRT; ->
EVQLVESGGGLEQAGGSLRLSCAASGLTFRSAAMGWFRQGPGKEREFVAAISRDG
AATYYTDSVKGRFTISRDNAKNTVFLQMNSLKPEDTAIYYCAADFRLARLRVADDYDYWGQGTQVTVSS
<118N121_B2_1_OK/1-130, SEQ ID NO: 2324; PRT; ->
EVQLVESGGGLVQAGGSLRLSCAASGFSLDDRAIAWFRQAPGKAREGVSCITPHH
GGIIFTRESVKGRFATSSDSAKNTVYLQMHSLKPEDTAVYYCATLRTDYSINWANCQRDSLYGYWGQGTQVTVSS
<118N121_B7_1_OK/1-119, SEQ ID NO: 2325; PRT; ->
EMQLVESGGGLVQPGGSLRLSCAASGNIPPINAMAWYRQAPGNERELVAAVTSGG
GTNYATSVKGRFIISRDDSKNTVDLQMNSLKPEDTAVYYCNLGGWTRTHPFDYWGQGTQVTVSS

TABLE B-4
Bivalent Nanobodies against HER2
as described in Example 12
<Name, SEQ ID #; PRT (protein); ->

<2A4-9GS-2A4, SEQ ID NO: 2326; PRT; ->
EVQLVESGGGLVQPGGSLRLSCAASGFIFDDYAMSWVRQAPGKGLEWVSA
INWSGSHRNYADSVKGRFTISRDNAKKTVYLQMNSLQSEDTAVYYCGTGW
QSTTKNQGYWGQGTQVTVSSGGGGSGGGSEVQLVESGGGLVQPGGSLRLS
CAASGFIFDDYAMSWVRQAPGKGLEWVSAINWSGSHRNYADSVKGRFTIS
RDNAKKTVYLQMNSLQSEDTAVYYCGTGWQSTTKNQGYWGQGTQVTVSS
<2A5-9GS-2A5, SEQ ID NO: 2327; PRT; ->
EVQLVESGGGLVQPGGSLRLSCATSGFTFDDYAMTWVRQAPGKGLEWVSS
INWSGTHTDYTDSVKGRFTISRNNANNTLYLQMNSLKSEDTAVYYCAKNW
GDAGTTWFEKSGSAGQGTQVTVSSGGGGSGGGSEVQLVESGGGLVQPGGS
LRLSCATSGFTFDDYAMTWVRQAPGKGLEWVSSINWSGTHTDYTDSVKGR
FTISRNNANNTLYLQMNSLKSEDTAVYYCAKNWGDAGTTWFEKSGSAGQG
TQVTVSS
<2C3-9GS-2C3, SEQ ID NO: 2328; PRT; ->
EVQLVESGGGLVQPGGSLRLSCVASGFSLDDYGMTWVRQAPGKGLEWVSS
INWSGTHTDYADSVKGRFTISRDNAKNTLFLQMNSLRSEDTAVYYCNQGW
KIVPTDRTGHGTQVTVSSGGGGSGGGSEVQLVESGGGLVQPGGSLRLSCV
ASGFSLDDYGMTWVRQAPGKGLEWVSSINWSGTHTDYADSVKGRFTISRD
NAKNTLFLQMNSLRSEDTAVYYCNQGWKIVPTDRTGHGTQVTVSS
<2D3-9GS-2D3, SEQ ID NO: 2329; PRT; ->
EVQLVESGGSLVQPGGSLRLSCAASGFTFDDYAMSWVRQVPGKGLEWVSS
INWSGTHTDYADSVKGRFTISRNNANNTLYLQMNSLKSEDTAVYYCAKNW
RDAGTTWFEKSGSAGQGTQVTVSSGGGGSGGGSEVQLVESGGSLVQPGGS
LRLSCAASGFTFDDYAMSWVRQVPGKGLEWVSSINWSGTHTDYADSVKGR
FTISRNNANNTLYLQMNSLKSEDTAVYYCAKNWRDAGTTWFEKSGSAGQG
TQVTVSS
<5F7-9GS-5F7, SEQ ID NO: 2330; PRT; ->
EVQLVESGGGLVQAGGSLRLSCAASGITFSINTMGWYRQAPGKQRELVAL
ISSIGDTYYADSVKGRFTISRDNAKNTVYLQMNSLKPEDTAVYYCKRFRT
AAQGTDYWGQGTQVTVSSGGGGSGGGSEVQLVESGGGLVQAGGSLRLSCA
ASGITFSINTMGWYRQAPGKQRELVALISSIGDTYYADSVKGRFTISRDN
AKNTVYLQMNSLKPEDTAVYYCKRFRTAAQGTDYWGQGTQVTVSS

TABLE B-5
Bispecific Nanobodies against HER2 and against
serum albumin as described in Example 12
<Name, SEQ ID #; PRT (protein); ->

<2C3-9GS-ALB1, SEQ ID NO: 2331; PRT; ->
EVQLVESGGGLVQPGGSLRLSCVASGFSLDDYGMTWVRQAPGKGLEWVSS
INWSGTHTDYADSVKGRFTISRDNAKNTLFLQMNSLRSEDTAVYYCNQGW
KIVPTDRTGHGTQVTVSSGGGGSGGGSEVQLVESGGGLVQPGNSLRLSCA
ASGFTFRSFGMSWVRQAPGKEPEWVSSISGSGSDTLYADSVKGRFTISRD
NAKTTLYLQMNSLKPEDTAVYYCTIGGSLSRSSQGTQVTVSS
<2A4-9GS-ALB1, SEQ ID NO: 2332; PRT; ->
EVQLVESGGGLVQPGGSLRLSCAASGFIFDDYAMSWVRQAPGKGLEWVSA
INWSGSHRNYADSVKGRFTISRDNAKKTVYLQMNSLQSEDTAVYYCGTGW
QSTTKNQGYWGQGTQVTVSSGGGGSGGGSEVQLVESGGGLVQPGNSLRLS
CAASGFTFRSFGMSWVRQAPGKEPEWVSSISGSGSDTLYADSVKGRFTIS
RDNAKTTLYLQMNSLKPEDTAVYYCTIGGSLSRSSQGTQVTVSS
<2A5-9GS-ALB1, SEQ ID NO: 2333; PRT; ->
EVQLVESGGGLVQPGGSLRLSCATSGFTFDDYAMTWVRQAPGKGLEWVSS
INWSGTHTDYTDSVKGRFTISRNNANNTLYLQMNSLKSEDTAVYYCAKNW
GDAGTTWFEKSGSAGQGTQVTVSSGGGGSGGGSEVQLVESGGGLVQPGNS
LRLSCAASGFTFRSFGMSWVRQAPGKEPEWVSSISGSGSDTLYADSVKGR
FTISRDNAKTTLYLQMNSLKPEDTAVYYCTIGGSLSRSSQGTQVTVSS
<2D3-9GS-ALB1, SEQ ID NO: 2334; PRT; ->
EVQLVESGGSLVQPGGSLRLSCAASGFTFDDYAMSWVRQVPGKGLEWVSS
INWSGTHTDYADSVKGRFTISRNNANNTLYLQMNSLKSEDTAVYYCAKNW
RDAGTTWFEKSGSAGQGTQVTVSSGGGGSGGGSEVQLVESGGGLVQPGNS
LRLSCAASGFTFRSFGMSWVRQAPGKEPEWVSSISGSGSDTLYADSVKGR
FTISRDNAKTTLYLQMNSLKPEDTAVYYCTIGGSLSRSSQGTQVTVSS
<5F7-9GS-ALB1, SEQ ID NO: 2335; PRT; ->
EVQLVESGGGLVQAGGSLRLSCAASGITFSINTMGWYRQAPGKQRELVAL
ISSIGDTYYADSVKGRFTISRDNAKNTVYLQMNSLKPEDTAVYYCKRFRT
AAQGTDYWGQGTQVTVSSGGGGSGGGSEVQLVESGGGLVQPGNSLRLSCA
ASGFTFRSFGMSWVRQAPGKEPEWVSSISGSGSDTLYADSVKGRFTISRD
NAKTTLYLQMNSLKPEDTAVYYCTIGGSLSRSSQGTQVTVSS

TABLE B-6

Biparatopic Nanobodies against HER2
<Name, SEQ ID #; PRT (protein); ->

<27B3-35GS-2D3, SEQ ID NO: 2336; PRT; ->
EVQLVESGGGLVQAGGSLTLSCTASETTVRIRTMAWYRQPPGNQREWVATIGSNGFATYPDSVKGRFTISRDN
AKNTVYLQMNSLKPEDTAVYYCRDINRDIWGQGSQVTVSSGGGGSGGGGSGGGGSGGGGSGGGGSGGGGSGGG
GSEVQLVESGGSLVQPGGSLRLSCAASGFTFDDYAMSWVRQVPGKGLEWVSSINWSGTHTDYADSVKGRFTIS
RNNANNTLYLQMNSLKSEDTAVYYCAKNWRDAGTTWFEKSGSAGQGTQVTVSS
<27C3-35GS-2D3, SEQ ID NO: 2337; PRT; ->
EVQLVESGGGLVQPGGSLRLSCAASGFTFDDYATSWVRQAPGKGPEWVSAINSGGGSTYYADSVKGRFTISRD
NAKNTLYLQMNSLKPEDTAVYYCARPRGSSLYLLEYDYWGQGTQVTVSSGGGGSGGGGSGGGGSGGGGSGGGG
SGGGGSGGGGSEVQLVESGGSLVQPGGSLRLSCAASGFTFDDYAMSWVRQVPGKGLEWVSSINWSGTHTDYAD
SVKGRFTISRNNANNTLYLQMNSLKSEDTAVYYCAKNWRDAGTTWFEKSGSAGQGTQVTVSS
<27E5-35GS-2D3, SEQ ID NO: 2338; PRT; ->
EVQLVESGGGLVQAGGSLTLSCTASETTVRIRTMAWYRQPPGNQREWVATIGSNGFATYPDSVKGRFTISRDN
AKNTVYLQMNSLKPEDTAVYYCRDINRDIWGQGSQVTVSSGGGGSGGGGSGGGGSGGGGSGGGGSGGGGSGGG
GSEVQLVESGGSLVQPGGSLRLSCAASGFTFDDYAMSWVRQVPGKGLEWVSSINWSGTHTDYADSVKGRFTIS
RNNANNTLYLQMNSLKSEDTAVYYCAKNWRDAGTTWFEKSGSAGQGTQVTVSS
<27F2-35GS-2D3, SEQ ID NO: 2339; PRT; ->
EVQLVESGGGLVQAGGSLRLSCAASGIISSFRTLAWYRQAPGKQRDWVATISSAGGTAYADAVKGRFTISISRD
NVEYTVDLQMDSLKPEDTAVYYCRDINGDYWGQGTQVTVSSGGGGSGGGGSGGGGSGGGGSGGGGSGGGGSGGG
GSEVQLVESGGSLVQPGGSLRLSCAASGFTFDDYAMSWVRQVPGKGLEWVSSINWSGTHTDYADSVKGRFTISR
NNANNTLYLQMNSLKSEDTAVYYCAKNWRDAGTTWFEKSGSAGQGTQVTVSS
<27D6-35GS-2D3, SEQ ID NO: 2340; PRT; ->
EVQLVESGGGLVQAGGSLTLSCTASETTVRIRTMAWYRQPPGNQREWVATIGSNGFATYPDSVKGRFTISRDNA
KNTVYLQMNSLKPEDTAVYYCRDINRDIWGQGSQVTVSSGGGGSGGGGSGGGGSGGGGSGGGGSGGGGSGGGGS
EVQLVESGGSLVQPGGSLRLSCAASGFTFDDYAMSWVRQVPGKGLEWVSSINWSGTHTDYADSVKGRFTISRNN
ANNTLYLQMNSLKSEDTAVYYCAKNWRDAGTTWFEKSGSAGQGTQVTVSS
<30D10-35GS-2D3, SEQ ID NO: 2341; PRT; ->
EVQLVESGGGLVQAGGSLTLSCTASETTVRIRTMAWYRQPPGNQREWVATIGSNGFATYPDSVKGRFTISRDNA
KNTVYLQMNSLKPEDTAVYYCRDINRDIWGQGSQVTVSSGGGGSGGGGSGGGGSGGGGSGGGGSGGGGSGGGGS
EVQLVESGGSLVQPGGSLRLSCAASGFTFDDYAMSWVRQVPGKGLEWVSSINWSGTHTDYADSVKGRFTISRNN
ANNTLYLQMNSLKSEDTAVYYCAKNWRDAGTTWFEKSGSAGQGTQVTVSS
<47D5-35GS-2D3, SEQ ID NO: 2342; PRT; ->
KVQLVESGGGLVQPGGSLRLSCAASGSIFGFNDMAWYRQAPGKQRELVALISRVGVTSSADSVKGRFTISRVNA
KDTVYLQMNSLKPEDTAVYYCYMDQRLDGSTLAYWGQGTQVTVSSGGGGSGGGGSGGGGSGGGGSGGGGSGGGG
SGGGGSEVQLVESGGSLVQPGGSLRLSCAASGFTFDDYAMSWVRQVPGKGLEWVSSINWSGTHTDYADSVKGRF
TISRNNANNTLYLQMNSLKSEDTAVYYCAKNWRDAGTTWFEKSGSAGQGTQVTVSS
<DUMMY-35GS-2D3, SEQ ID NO: 2343; PRT; ->
EVQLVESGGGLVQAGGSLRLSCAASGRTFRSYPMGWFRQAPGKEREFVASITGSGGSTYYADSVKGRFTISRDN
AKNTVYLQMNSLRPEDTAVYSCAAYIRPDTYLSRDYRKYDYWGQGTQVTVSSGGGGSGGGGSGGGGSGGGGSGG
GGSGGGGSGGGGSEVQLVESGGSLVQPGGSLRLSCAASGFTFDDYAMSWVRQVPGKGLEWVSSINWSGTHTDYA
DSVNGRFTISRNNANNTLYLQMNSLKSEDTAVYYCAKNWRDAGTTWFEKSGSAGQGTQVTVSS
<2D3-35GS-2D3, SEQ ID NO: 2344; PRT; ->
EVQLVESGGSLVQPGGSLRLSCAASGFTFDDYAMSWVRQVPGKGLEWVSSINWSGTHTDYADSVKGRFTISRNN
ANNTLYLQMNSLKSEDTAVYYCAKNWRDAGTTWFEKSGSAGQGTQVTVSSGGGGSGGGGSGGGGSGGGGSGGGG
SGGGGSGGGGSEVQLVESGGSLVQPGGSLRLSCAASGFTFDDYAMSWVRQVPGKGLEWVSSINWSGTHTDYADS
VKGRFTISRNNANNTLYLQMNSLKSEDTAVYYCAKNWRDAGTTWFEKSGSAGQGTQVTVSS
<DUMMY-35GS-47D5, SEQ ID NO: 2345; PRT; ->
EVQLVESGGGLVQAGGSLRLSCAASGRTFRSYPMGWFRQAPGKEREFVASITGSGGSTYYADSVKGRFTISRDN
AKNTVYLQMNSLRPEDTAVYSCAAYIRPDTYLSRDYRKYDYWGQGTQVTVSSGGGGSGGGGSGGGGSGGGGSGG
GGSGGGGSGGGGSEVQLVESGGGLVQPGGSLRLSCAASGSIFGFNDMAWYRQAPGKQRELVALISRVGVTSSAD
SVKGRFTISRVNAKDTVYLQMNSLKPEDTAVYYCYMDQRLDGSTLAYWGQGTQVTVSS
<5F7-35GS-47D5, SEQ ID NO: 2346; PRT; ->
EVQLVESGGGLVQAGGSLRLSCAASGITFSINTMGWYRQAPGKQRELVALISSIGDTYYADSVKGRFTISRDNA
KNTVYLQMNSLKPEDTAVYYCKRFRTAAQGTDYWGQGTQVTVSSGGGGSGGGGSGGGGSGGGGSGGGGSGGGGS
GGGGSEVQLVESGGGLVQPGGSLRLSCAASGSIFGFNDMAWYRQAPGKQRELVALISRVGVTSSADSVKGRFTI
SRVNAKDTVYLQMNSLKPEDTAVYYCYMDQRLDGSTLAYWGQGTQVTVSS
<47D5-35GS-5F7, SEQ ID NO: 2347; PRT; ->
KVQLVESGGGLVQPGGSLRLSCAASGSIFGFNDMAWYRQAPGKQRELVALISRVGVTSSADSVKGRFTISRVNA
KDTVYLQMNSLKPEDTAVYYCYMDQRLDGSTLAYWGQGTQVTVSSGGGGSGGGGSGGGGSGGGGSGGGGSGGGG
SGGGGSEVQLVESGGGLVQAGGSLRLSCAASGITFSINTMGWYRQAPGKQRELVALISSIGDTYYADSVKGRFT
ISRDNAKNTVYLQMNSLKPEDTAVYYCKRFRTAAQGTDYWGQGTQVTVSS
<2D3-35GS-47D5, SEQ ID NO: 2348; PRT; ->
EVQLVESGGSLVQPGGSLRLSCAASGFTFDDYAMSWVRQVPGKGLEWVSSINWSGTHTDYADSVKGRFTISRNN
ANNTLYLQMNSLKSEDTAVYYCAKNWRDAGTTWFEKSGSAGQGTQVTVSSGGGGSGGGGSGGGGSGGGGSGGGG
SGGGGSGGGGSEVQLVESGGGLVQPGGSLRLSCAASGSIFGFNDMAWYRQAPGKQRELVALISRVGVTSSADSV
KGRFTISRVNAKDTVYLQMNSLKPEDTAVYYCYMDQRLDGSTLAYWGQGTQVTVSS
<27F7-35GS-2D3, SEQ ID NO: 2349; PRT; ->
EVQLVESGGGLVQAGGSLRLSCVVSGIPSTIRAMAWYRQAPGRQRDWVATIYSPSGSAVYADSVKGRFTISSDN
AKKTIYLQMNSLKPDDTAVYYCRDVNREYWGQGTQVTVSSGGGGSGGGGSGGGGSGGGGSGGGGSGGGGSGGGG
SEVQLVESGGSLVQPGGSLRLSCAASGFTFDDYAMSWVRQVPGKGLEWVSSINWSGTHTDYADSVKGRFTISRN
NANNTLYLQMNSLKSEDTAVYYCAKNWRDAGTTWFEKSGSAGQGTQVTVSS
<28F6-35GS-2D3, SEQ ID NO: 2350; PRT; ->
EVQLVESGGGLVQAGGSLNLSCVASGIPFSTRTMAWYRQPPGNERDWVATIRSGAPVYADSVKGRFTVSRDNAK
NTLYLQMNSLEPEDTATYYCWDVNGDIWGQGTPVTVSSGGGGSGGGGSGGGGSGGGGSGGGGSGGGGSGGGGSE
VQLVESGGSLVQPGGSLRLSCAASGFTFDDYAMSWVRQVPGKGLEWVSSINWSGTHTDYADSVKGRFTISRNNA
NNTLYLQMNSLKSEDTAVYYCAKNWRDAGTTWFEKSGSAGQGTQVTVSS
<28G3-35GS-2D3, SEQ ID NO: 2351; PRT; ->
EVQLVESGGGLVQAGGSLNLSCVASGIPFSTRTMAWYRQPPGNERDWVATIRSGAPVYADSVKGRFTVSRDNAK
NTLYLQMNSLEPEDTATYYCWDVNGDIWGQGTPVTVSSGGGGSGGGGSGGGGSGGGGSGGGGSGGGGSGGGGSE
VQLVESGGSLVQPGGSLRLSCAASGFTFDDYAMSWVRQVPGKGLEWVSSINWSGTHTDYADSVKGRFTISRNNA
NNTLYLQMNSLKSEDTAVYYCAKNWRDAGTTWFEKSGSAGQGTQVTVSS
<28G5-35GS-2D3, SEQ ID NO: 2352; PRT; ->
EVQLVESGGGLVQAGGSLRLSCVTSRRPASTRTMAWYRQAPGKQRDWVATISSHGLPVYADSVKGRFTVSRDNA
NNTVYLQMNTLKPEDTAVYYCRDVNADYWGQGTQVTVSSGGGGSGGGGSGGGGSGSGGSGGGGSGGGGSGGGGS
EVQLVESGGSLVQPGGSLRLSCAASGFTFDDYAMSWVRQVPGKGLEWVSSINWSGTHTDYADSVKGRFTISRNN
ANNTLYLQMNSLKSEDTAVYYCAKNWRDAGTTWFEKSGSAGQGTQVTVSS
<29D9-35GS-2D3, SEQ ID NO: 2353; PRT; ->
EVQLVESGGGLVQPGGSLRLSCAASRIPFSTRTMAWYRQAPGKQRDWVATIGTSGPPRYADSVKGRFTVSRDNA
KNTVYLQMNSLKAEDTAVYYCWDVNADYWGQGTQVTVSSGGGGSGGGGSGGGGSGGGGSGGGGSGGGGSGGGGS
EVQLVESGGSLVQPGGSLRLSCAASGFTFDDYAMSWVRQVPGKGLEWVSSINWSGTHTDYADSVKGRFTISRNN
ANNTLYLQMNSLKSEDTAVYYCAKNWRDAGTTWFEKSGSAGQGTQVTVSS
<29E9-35GS-2D3, SEQ ID NO: 2354; PRT; ->
EVQLVESGGGLVQPGGSLRLSCVASRIPASIRTMAWYRQTPGNQRDWLATIGSSGTPAYADSVKGRFTVSRDNA
KNTVYLQMNSLKPEDTAVYYCRDVNGDYWGQGTQVTVSSGGGGSGGGGSGGGGSGGGGSGGGGSGGGGSGGGGS
EVQLVESGGSLVQPGGSLRLSCAASGFTFDDYAMSWVRQVPGKGLEWVSSINWSGTHTDYADSVKGRFTISRNN
ANNTLYLQMNSLKSEDTAVYYCAKNWRDAGTTWFEKSGSAGQGTQVTVSS
<30E10-35GS-2D3, SEQ ID NO: 2355; PRT; ->
KVQLVESGGSLVPPGGSLRLSCAASGFTFDDYAMTWVRQAPGKGLEWVSSINWSGTHTDYTDSVKGRFTISRNN
ANNTLYLQMNSLKSEDTAVYYCAKNWGDAGTTWFEKSGSAGQGTQVTVSSGGGGSGGGGSGGGGSGGGGSGGGG
SGGGGSGGGGSEVQLVESGGSLVQPGGSLRLSCAASGFTFDDYAMSWVRQVPGKGLEWVSSINWSGTHTDYADS
VKGRFTISRNNANNTLYLQMNSLKSEDTAVYYCAKNWRDAGTTWFEKSGSAGQGTQVTVSS
<31D11-35GS-2D3, SEQ ID NO: 2356; PRT; ->
EVQLVESGGGLVQAGGSLNLSCVASGIPFSTRTMAWYRQPPGNERDWVATIRSGAPVYADSVKGRFTVSRDNAK
NTLYLQMNSLEPEDTATYYCWDVNGDIWGQGTPVTVSSGGGGSGGGGSGGGGSGGGGSGGGGSGGSGSGGGGSE
VQLVESGGSLVQPGGSLRLSCAASGFTFDDYAMSWVRQVPGKGLEWVSSINWSGTHTDYADSVKGRFTISRNNA
NNTLYLQMNSLKSEDTAVYYCAKNWRDAGTTWFEKSGSAGQGTQVTVSS
<27G2-35GS-2D3, SEQ ID NO: 2357; PRT; ->
EVQLVESGGSLVQPGGSLRLSCAASGFTFDDYAMTWVRQTPGKGLEWVSSINWSGTHTDYTDSVKGRFTISRNN
ANNTLYLQMNSLKSDDTAVYYCAKNWGDAGTTWFEKSGSAGPGTQVTVSSGGGGSGGGGSGGGGSGGGGSGGGG
SGGGGSGGGGSEVQLVESGGSLVQPGGSLRLSCAASGFTFDDYAMSWVRQVPGKGLEWVSSINWSGTHTDYADS
VKGRFTISRNNANNTLYLQMNSLKSEDTAVYYCAKNWRDAGTTWFEKSGSAGQGTQVTVSS
<P27G4-35GS-2D3, SEQ ID NO: 2358; PRT; ->
EVQLVESGGGLVQAGGSLRLSCVTSRRPASTRTMAWYRQAPGKQRDWVATISSHGLPVYADSVKGRFTVSRDNA
NNTVYLQMNTLKPEDTAVYYCRDVNADYWGQGTQVTVSSGGGGSGGGGSGGGGSGGGGSGGGGSGGGGSGGGGS
EVQLVESGGSLVQPGGSLRLSCAASGFTFDDYAMSWVRQVPGKGLEWVSSINWSGTHTDYADSVKGRFTISRNN
ANNTLYLQMNSLKSEDTAVYYCAKNWRDAGTTWFEKSGSAGQGTQVTVSS
<27G5-35GS-2D3, SEQ ID NO: 2359; PRT; ->
EVQLVESGGGLVQPGGSLRLSCVASRIPASIRTMAWYRQTPGNQRDWLATIGSSGTPAYADSVKGRFTVSRDNA
KNTVYLQMNSLKPEDTAVYYCRDVNGDYWGQGTQVTVSSGGGGSGGGGSGGGGSGGGGSGGGGSGGGGSGGGGS
EVQLVESGGSLVQPGGSLRLSCAASGFTFDDYAMSWVRQVPGKGLEWVSSINWSGTHTDYADSVKGRFTISRNN
ANNTLYLQMNSLKSEDTAVYYCAKNWRDAGTTWFEKSGSAGQGTQVTVSS
<27G7-35GS-2D3, SEQ ID NO: 2360; PRT; ->
EVQLVESGGGLVQAGGSLRLSCVTSRRPASTRTMAWYRQAPGKQRDWVATISSHGLPVYADSVKGRFTVSRDNA
NNTVYLQMNTLKPEDTAVYYCRDVNADYWGQGTQVTVSSGGGGSGGGGSGGGGSGGGGSGGGGSGGGGSGGGGS
EVQLVESGGSLVQPGGSLRLSCAASGFTFDDYAMSWVRQVPGKGLEWVSSINWSGTHTDYADSVKGRFTISRNN
ANNTLYLQMNSLKSEDTAVYYCAKNWRDAGTTWFEKSGSAGQGTQVTVSS
<27H1-35GS-2D3, SEQ ID NO: 2361; PRT; ->
EVQLVESGGGLVQAGGSLRLSCVTSRRPASTRTMAWYRQAPGKQRDWVATISSHGLPVYADSVKGRFTVSRDNA
NNTVYLQMNTLKPEDTAVYYCRDVNADYWGQGTQVTVSSGGGGSGGGGSGGGGSGGGGSGGGGSGGGGSGGGGS
EVQLVESGGSLVQPGGSLRLSCAASGFTFDDYAMSWVRQVPGKGLEWVSSINWSGTHTDYADSVKGRFTISRNN
ANNTLYLQMNSLKSEDTAVYYCAKNWRDAGTTWFEKSGSAGQGTQVTVSS
<27H2-35GS-2D3, SEQ ID NO: 2362; PRT; ->
EVQLVESGGGLVQAGGSLRLSCVTSRRPASTRTMAWYRQAPGKQRDWVATISSHGLPVYADSVKGRFTVSRDNA
NNTVYLQMNTLKPEDTAVYYCRDVNADYWGQGTQVTVSSGGGGSGGGGSGGGGSGGGGSGGGGSGGGGSGGGGS
EVQLVESGGSLVQPGGSLRLSCAASGFTFDDYAMSWVRQVPGKGLEWVSSINWSGTHTDYADSVKGRFTISRNN
ANNTLYLQMNSLKSEDTAVYYCAKNWRDAGTTWFEKSGSAGQGTQVTVSS
<27H3-35GS-2D3, SEQ ID NO: 2363; PRT; ->
EVQLVESGGSLVQPGGSLRLSCAASGFTFDDYAMTWVRQASGKGLEWVSSINWSGTHTDYTDSVKGRFTISRNN
ANNTLYLQMNSLKSEDTAVYYCAKNWGDAGTTWFEKSGSAGQGTQVTVSSGGGGSGGGGSGGGGSGGGGSGGGG
SGGGGSGGGGSEVQLVESGGSLVQPGGSLRLSCAASGFTFDDYAMSWVRQVPGKGLEWVSSINWSGTHTDYADS
VKGRFTISRNNANNTLYLQMNSLKSEDTAVYYCAKNWRDAGTTWFEKSGSAGQGTQVTVSS
<27H4-35GS-2D3, SEQ ID NO: 2364; PRT; ->
EVQLVESGGGLVQAGGSLRLSCVASKMTFMRYTMGWYRQAPGKQRDLVASIDASGGTNYADSVKGRFTISRDNA
KNTVYLEMNSLKPEDTGVYYCNGRWDIVGAIWWGQGTQVTVSSGGGGSGGGGSGGGGSGGGGSGGGGSGGGGSG
GGGSEVQLVESGGSLVQPGGSLRLSCAASGFTFDDYAMSWVRQVPGKGLEWVSSINWSGTHTDYADSVKGRFTI
SRNNANNTLYLQMNSLKSEDTAVYYCAKNWRDAGTTWFEKSGSAGQGTQVTVSS
<27H5-35GS-2D3, SEQ ID NO: 2365; PRT; ->
EVQLVESGGGLVQAGGSLRLSCAASGFTFDDYGIGWFRQASGKEREGVSCITSSDGSTYYADSVKGRFTISSDN
AKNTVYLQMNSLKPEDTAVYYCAALPFVCPSGSYSDYGDEYDYWGQGTQVTVSSGGGGSGGGGSGGGGSGGGGS
GGGGSGGGGSGGGGSEVQLNESGGSLVQPGGSLRLSCAASGFTFDDYAMSWVRQVPGKGLEWVSSINWSGTHTD
YADSVKGRFTISRNNANNTLYLQMNSLKSEDTAVYYCAKNWRDACTTWFEKSGSAGQGTQVTVSS
<27H7-35GS-2D3, SEQ ID NO: 2366; PRT; ->
EVQLVESGGGLVQAGGSLRLSCAASGIAFRIRTMAWYRQAPGKQRDWVATSDSGGTTLYADSVKGRFTVSRDNA
ENTVYLQMNSLKPEDTAVYYCRDVNRDYWGQGTQVTVSSGGGGSGGGGSGGGGSGGGGSGGGGSGGGGSGGGGS
EVQLVESGGSLVQPGGSLRLSCAASGFTFDDYAMSWVRQVPGKGLEWVSSINWSGTHTDYADSVKGRFTISRNN
ANNTLYLQMNSLKSEDTAVYYCAKNWRDAGTTWFEKSGSAGQGTQVTVSS
<27A3-35GS-2D3, SEQ ID NO: 2367; PRT; ->
EVQLVESGGGLVQAGGSLSLSCVASGRFFSTRVMAWYRQTPGKQREFVASMRGSGSTNYADSVRGRFAISRDNA
KNTVYLQMNTLKPEDTAVYYCRDINEDQWGQGTQVTVSSGGGGSGGGGSGGGGSGGGGSGGGGSGGGGSGGGGS
EVQLVESGGSLVQPGGSLRLSCAASGFTFDDYAMSWVRQVPGKGLEWVSSINWSGTHTDYADSVKGRFTISRNN
ANNTLYLQMNSLKSEDTAVYYCAKNWRDAGTTWFEKSGSAGQGTQVTVSS
<27A4-35GS-2D3, SEQ ID NO: 2368; PRT; ->
EVQLVESGGGLVQAGGSLRLSCVTSRRPASTRTMAWYRQAPGKQRDWVATISSHGLPVYADSVKGRFTVSRDNA
NNTVYLQMNTLKPEDTAVYYCRDVNADYWGQGTQVTVSSGGGGSGGGGSGGGGSGGGGSGGGGSGGGGSGGGGS
EVQLVESGGSLVQPGGSLRLSCAASGFTFDDYAMSWVRQVPGKGLEWVSSINWSGTHTDYADSVKGRFTISRNN
ANNTLYLQMNSLKSEDTAVYYCAKNWRDAGTTWFEKSGSAGQGTQVTVSS
<27A5-35GS-2D3, SEQ ID NO: 2369; PRT; ->
EVQLVESGGGLVQAGGSLNLSCVASGIPFSTRTMAWYRQPPGNERDWVATIRSGAPVYADSVKGRFTVSRDNAK
NTLYLQMNSLEPEDTATYYCWDVNGDIWGQGTPVTVSSGGGGSGGGGSGGGGSGGGGSGGGGSGGGGSGGGGSE
VQLVESGGSLVQPGGSLRLSCAASGFTFDDYAMSWVRQVPGKGLEWVSSINWSGTHTDYADSVKGRFTISRNNA
NNTLYLQMNSLKSEDTAVYYCAKNWRDAGTTWFEKSGSAGQGTQVTVSS
<27B1-35GS-2D3, SEQ ID NO: 2370; PRT; ->
EVQLVESGGSLVQPGGSLRLSCAASGFTFDDYAMSWVRQAPGKGLEWISSINWSGTHTDYADSVKGRFTISRNN
ANNTLYLQMNNLKFEDTAVYYCAKNWRDAGTTWFEKSGSAGQGTQVTVSSGGGGSGGGGSGGGGSGGGGSGGGG
SGGGGSGGGGSEVQLVESGGSLVQPGGSLRLSCAASGFTFDDYAMSWVRQVPGKGLEWVSSINWSGTHTDYADS
VKGRFTISRNNANNTLYLQMNSLKSEDTAVYYCAKNWRDAGTTWFEKSGSAGQGTQVTVSS
<27B2-35GS-2D3, SEQ ID NO: 2371; PRT; ->
EVQLVESGGGLVQAGGSLRLSCVASGIPSIRAIAWYRQAPGKQRDWVATSGTGYGATYDDSVKGRFTLSRDNAK
NTVYLQMNSLKPEDTAVYYCRDVNRDYWGQGTQVTVSSGGGGSGGGGSGGGGSGGGGSGGGGSGGGGSGGGGSE
VQLVESGGSLVQPGGSLRLSCAASGFTFDDYAMSWVRQVPGKGLEWVSSINWSGTHTDYADSVKGRFTISRNNA
NNTLYLQMNSLKSEDTAVYYCAKNWRDAGTTWFEKSGSAGQGTQVTVSS
<27B5-35GS-2D3, SEQ ID NO: 2372; PRT; ->
EVQLVESGGGLVQAGGSLRLPCAASGIAFRIRTMAWYRQAPGKQRDWVATSDSGGTTLYADSVKGRFTVSRDNA
ENTVYLQMNSLKPEDTAVYYCRDVNRDYWGQGTQVTVSSGGGGSGGGGSGGGGSGGGGSGGGGSGGGGSGGGGS
EVQLVESGGSLVQPGGSLRLSCAASGFTFDDYAMSWVRQVPGKGLEWVSSINWSGTHTDYADSVKGRFTISRNN
ANNTLYLQMNSLKSEDTAVYYCAKNWRDAGTTWFEKSGSAGQGTQTVSS
<27B7-35GS-2D3, SEQ ID NO: 2373; PRT; ->
EVQLVESGGGLVQPGGSLRLSCAASGFTFSSYAMSWVROAPGKGLEWVSAISSGGGSITTYADSVKGRFTISRD
NAKNTLYLQMSSLKPEDTALYYCAKARSSSSYYDFGSWGQGTQVTVSSGGGGSGGGGSGGGGSGGGGSGGGGSG
GGGSGGGGSEVQLVESGGSLVQPGGSLRLSCAASGFTFDDYAMSWVRQVPGKGLEWVSSINWSGTHTDYADSVK
GRFTISRNNANNTLYLQMNSLKSEDTAVYYCAKNWRDAGTTWFEKSGSAGQGTQVTVSS
<27C2-35GS-2D3, SEQ ID NO: 2374; PRT; ->
EVQLVESGGSLVQPGGSLRLSCAASGFTFDDYAMTWVRQASGKGLEWVSSINWSGTHTDYTDSVKGRFTISRNN
ANNTLYLQMNSLKSEDTAVYYCAKNWGDAGTTWFEKSGSAGQGTQVTVSSGGGGSGGGGSGGGGSGGGGSGGGG
SGGGGSGGGGSEVQLVESGGSLVQPGGSLRLSCAASGFTFDDYAMSWVRQVPGKGLEWVSSINWSGTHTDYADS
VKGRFTISRNNANNTLYLQMNSLKSEDTAVYYCAKNWRDAGTTWFEKSGSAGQGTQVTVSS
<27C5-35GS-2D3, SEQ ID NO: 2375; PRT; ->
EVQLVESGGGLVQAGGSLNLSCVASGIPFSTRTMAWYRQPPGNERDWVATIRSGAPVYADSVKGRFTVSRDNAK
NTLYLQMNSLEPEDTATYYCWDVNGDIWGQGTPVTVSSGGGGSGGGGSGGGGSGGGGSGGGGSGGGGSGGGGSE
VQLVESGGSLVQPGGSLRLSCAASGFTFDDYAMSWVRQVPGKGLEWVSSINWSGTHTDYADSVKGRFTISRNNA
NNTLYLQMNSLKSEDTAVYYCAKNWRDAGTTWFEKSGSAGQGTQVTVSS
<27C7-35GS-2D3, SEQ ID NO: 2376; PRT; ->
EVQLVESGGGLVQAGGSLRLSCAASGIAFRIRTMAWYRQAPGKQRDWVATSDSGGTTLYADSVKGRFTVSRDNA
DNTVYLQMNSLKPEDTAVYYCRDVNRDYWGQGTQVTVSSGGGGSGGGGSGGGGSGGGGSGGGGSGGGGSGGGGS
EVQLVESGGSLVQPGGSLRLSCAASGFTFDDYAMSWVRQVPGKGLEWVSSINWSGTHTDYADSVKGRFTISRNN
ANNTLYLQMNSLKSEDTAVYYCAKNWRDAGTTWFEKSGSAGQGTQVTVSS
<27D1-35GS-2D3, SEQ ID NO: 2377; PRT; ->
EVQLVESGGGLVQPGGSLRLSCVASGFSLDDYGMTWVRQAPGKGLEWVSSINWSGTHTDYADSVKGRFTISRDN
AKNTLFLQMNSLTPEDTAVYYCNQGWKILPAERRGHGTQTVSSGGGGSGGGGSGGGGSGGGGSGGGGSGGGGS
GGGGSEVQLVESGGSLVQPGGSLRLSCAASGFTFDDYAMSWVRQVPGKGLEWVSSINWSGIHTDYADSVKGRFT
ISRNNANNTLYLQMNSLKSEDTAVYYCAKNWRDAGTTWFEKSGSAGQGTQVTVSS
<27D2-35GS-2D3, SEQ ID NO: 2378; PRT; ->
EVQLVESGGGLVQPGGSLRLSCAASGLGIAFSRRTMAWYRQAPGKQRDWVATIAGDGSTVYADSMKGRFTISRD
NAKNTVYLQVNSLKPEDTAVYYCWDTNGDYWGQGTQVTVSSGGGGSGGGGSGGGGSGGGGSGGGGSGGGGSGGG
GSEVQLVESGGSLVQPGGSLRLSCAASGFTFDDYAMSWVRQVPGKGLEWVSSINWSGTHTDYADSVKGRFTISR
NNANNTLYLQMNSLKSEDTAVYYCAKNWRDAGTTWFEKSGSAGQGTQVTVSS
<27D3-35GS-2D3, SEQ ID NO: 2379; PRT; ->
EVQLMESGGGLVQFGGSLRLSCAASGLGIAFSRRTMAWYRQAPGKQRDWVATIAGDGSTVYADSMKGRFTISRD
NAENTVYLQMNSLKPEDTAVYYCWDVNRDYWGQGTQVTVSSGGGGSGGGGSGGGGSGGGGSGGGGSGGGGSGGG
GSEVQLVESGGSLVQPGGSLRLSCAASGFTFDDYAMSWVRQVPGKGLEWVSSINWSGTHTDYADSVKGRFTISR
NNANNTLYLQMNSLKSEDTAVYYCAKNWRDAGTTWFEKSGSAGQGTQVTVSS
<27D4-35GS-2D3, SEQ ID NO: 2380; PRT; ->
EVQLVESGGSLVQPGGSLRLSCAASGFTFDDYAMTWVRQASGKGLEWVSSINWSGTHTDYADSVKGRFTISRNN
ANNTLYLQMNSLKSEDTAVYYCAKNWGDAGTTWFEKSGSAGQGTQVTVSSGGGGSGGGGSGGGGSGGGGSGGGG
SGGGGSGGGGSEVQLVESGGSLVQPGGSLRLSCAASGFTFDDYAMSWVRQVPGKGLEWVSSINWSGTHTDYADS
VKGRFTISRNNANNTLYLQMNSLKSEDTAVYYCAKNWRDAGTTWFEKSGSAGQGTQVTVSS
<27D7-35GS-2D3, SEQ ID NO: 2381; PRT; ->
EVQLVESGGGLVQPGGSLRLSCVASGFSLDDYGMTWVRQAPGKGLEWVSSINWSGTHTDYADSVKGRFTISRDN
AKNTLFLQMNSLSPEDTAVYYCNQGWKILPTNRGSHGTQVTVSSGGGGSGGGGSGGGGSGGGGSGGGGSGGGGS
GGGGSEVQLVESGGSLVQPGGSLRLSCAASGFTFDDYAMSWVRQVPGKGLEWVSSINWSGTHTDYADSVKGRFT
ISRNNANNTLYLQMNSLKSEDTAVYYCAKNWRDAGTTWFEKSGSAGQGTQVTVSS
<27E2-35GS-2D3, SEQ ID NO: 2382; PRT; ->
EVQLVESGGGLVQPGGSLRLSCVASGFSLDDYGMTWVRQAPGKGLEWVSSINWSGTHTDYADSVKGRFTISRDN
AKNTLFLQMNSLTPEDTAVYYCNQGWKIIPTDRRGHGTQVTVSSGGGGSGGGGSGGGGSGGGGSGGGGSGGGGS
GGGGSEVQLVESGGSLVQPGGSLRLSCAASGFTFDDYAMSWVRQVPGKGLEWVSSINWSGTHTDYADSVKGRFT
ISRNNANNTLYLQMNSLKSEDTAVYYCAKNWRDAGTTWFEKSGSAGQGTQVTVSS
<27E4-35GS-2D3, SEQ ID NO: 2383; PRT; ->
EVQLVESGGGLVQAGGSLRLSCAASGSTFSINRMAWYRQSPGKQRELVAAVDNDDNTEYSDSVAGRFTISRDNA
KNAVHLQMNSLRLEDTAVYYCNAKQLPYLQNFWGQGTQVTVSSGGGGSGGGGSGGGGSGGGGSGGGGSGGGGSG
GGGSEVQLVESGGSLVQPGGSLRLSCAASGFTFDDYAMSWVRQVPGKGLEWVSSINWSGTHTDYADSVKGRFTI
SRNNANNTLYLQMNSLKSEDTAVYYCAKNWRDAGTTWFEKSGSAGQGTQVTVSS
<27E7-35GS-2D3, SEQ ID NO: 2384; PRT; ->
EVQLVESGGGLVQAGGSLRLSCAASGITFRRYDMGWYRQFPGKERELVATILSEGDTNYVDPVKGRFTISRDNA
KNTVYLQMNDLKPEDTAVYYCNGVWRAIGRTYWGQGTQVTVSSGGGGSGGGGSGGGGSGGGGSGGGGSGGGGSG
GGGSEVQLVESGGSLVQPGGSLRLSCAASGFTFDDYAMSWVRQVPGKGLEWVSSINWSGTHTDYADSVKGRFTI
SRNNANNTLYLQMNSLKSEDTAVYYCAKNWRDAGTTWFEKSGSAGQGTQVTVSS
<29H1-35GS-2D3, SEQ ID NO: 2385; PRT; ->
EVQLVESGGSLVPPGGSLRLSCAASGFTFDDYAMSWVRQAPGKGLEWVSSINWSGTHTGYTDSVKGRFTISRNN
ANNTLYLQMNSLKSEDTAVYYCAKNWGDAGTTWFEKSGSAGQGTQVTVSSGGGGSGGGGSGGGGSGGGGSGGGG
SGGGGSGGGGSEVQLVESGGSLVQPGGSLRLSCAASGFTFDDYAMSWVRQVPGKGLEWVSSINWSGTHTDYADS
VKGRFTISRNNANNTLYLQMNSLKSEDTAVYYCAKNWRDAGTTWFEKSGSAGQGTQVTVSS
<30H9-35GS-2D3, SEQ ID NO: 2386; PRT; ->
EVQLVESGGSLVQPGGSLRLSCAASGFTFDDYAMTWVRQAPGKGLEWVSSINWSGTHTDYTDSVKGRFTISRNN
ANNTLYLQMNSLKSEDTAVYYCAKNWGDAGTTWFEKSGSAGQGTQVTVSSGGGGSGGGGSGGGGSGGGGSGGGG
SGGGGSGGGGSEVQLVESGGSLVQPGGSLRLSCAASGFTFDDYAMSWVRQVPGKGLEWVSSINWSGTHTDYADS
VKGRFTISRNNANNTLYLQMNSLKSEDTAVYYCAKNWRDAGTTWFEKSGSAGQGTQVTVSS
<39C1-35GS-2D3, SEQ ID NO: 2387; PRT; ->
EVQLVESGGSLVPPGGSLRLSCAASGFTFDDYGMSWVRQAPGKGLEWVSSINWSGTHTDYTDSVKGRFTISRNN
ANNTLYLQMNSLKSEDTAVYYCAKNWGDAGTTWFEKSGSAGQGTQVTVSSGGGGSGGGGSGGGGSGGGGSGGGG
SGGGGSGGGGSEVQLVESGGSLVQPGGSLRLSCAASGFTFDDYAMSWVRQVPGKGLEWVSSINWSGTHTDYADS
VKGRFTISRNNANNTLYLQMNSLKSEDTAVYYCAKNWRDAGTTWFEKSGSAGQGTQVTVSS
<27G8-35GS-2D3, SEQ ID NO: 2388; PRT; ->
EVQLVESGGGLVQPGGSLRLSCVASGFSLDDYGMTWVRQAPGKGLEWVSSINWSGTHTDYADSVKGRFTISRDN
AKNTLFLQMNSLTPEDTAVYYCNQGWKILPAERRGHGTQVTVSSGGGGSGGGGSGGGGSGGGGSGGGGSGGGGS
GGGGSEVQLVESGGSLVQPGGSLRLSCAASGFTFDDYAMSWVRQVPGKGLEWVSSINWSGTHTDYADSVKGRFT
ISRNNANNTLYLQMNSLKSEDTAVYYCAKNWRDAGTTWFEKSGSAGQGTQVTVSS
<29H2-35GS-2D3, SEQ ID NO: 2389; PRT; ->
EVQLVESGGGLVQPGGSLRLSCVASGFSLDDYGMTWVRQAPGKGLEWVSSINWSGTHTDYADSVKGRFTISRDN
AKNTLFLQMNNLTPEDTAVYYCNQGWKIIPTDRRGHGTQVTVSSGGGGSGGGGSGGGGSGGGGSGGGGSGGGGS
GGGGSEVQLVESGGSLVQPGGSLRLSCAASGFTFDDYAMSWVRQVPGKGLEWVSSINWSGTHTDYADSVKGRFT
ISRNNANNTLYLQMNSLKSEDTAVYYCAKNWRDAGTTWFEKSGSAGQGTQTVSS
<38C6-35GS-2D3, SEQ ID NO: 2390; PRT; ->
EVQLVESGGGLVQPGGSLRLSCVGSGFSLDDYAMTWVRQAPGKGLEWVSSINWSGTHTDYADSVKGRFTISRDN
AKNTLFLQMNSLSPEDTAVYYCNQGWKIRPTIPMGHGTQVTVSSGGGGSGGGGSGGGGSGGGGSGGGGSGGGGS
GGGGSEVQLVESGGSLVQPGGSLRLSCAASGFTFDDYAMSWVRQVPGKGLEWVSSINWSGTHTDYADSVKGRFT
ISRNNANNTLYLQMNSLKSEDTAVYYCAKNWRDAGTTWFEKSGSAGQGTQVTVSS

TABLE C-1
Sequence of HER2 binding Nanobodies aligned by family
HERCEPTIN ® COMPETING

| | |
|---|---|
| 13D11 | EVQLVESGGGLVHPGGSLRLSCVGSGFSLDDYGMTWVRRAPGKGLEWVSSINWSGTHTDYADSVKGRFTISRDNAKNTLFLQMNSLNPEDTAVYYCGQGWKIVPTNPRGHGTQVTVSS |
| 2B4 | EVQLVESGGGLVQPGGSLRLSCVGSGFSLDDYAMTWVRQAPGKGLEWVSSINWSGTHTDYADSVKGRFTISRDNAKNTLFLQMNSLNPEDTAVYYCNQGWKIRPTIPMGHGTQVTVSS |
| 2G2 | EVQLVESGGGLVQPGGSLRLSCVASGFSLDDYGMTWVRQAPGKGLEWVSSINWSGTHTDYTDPVKGRFTISRDNAKNTLFLQMNNLTPEDTAVYYCNRGWKIVPTDLGGHGTQVTVSS |
| 13D2 | EVQLVESGGGLVQPGGSLRLSCVASGFSLDDYGMTWVRQAPGKGLEWVSSINWSGTHTDYADSVKGRFTISRDNAKNTLFLQMNNLRSEDTAVYSCNQGWKIVPTDRGGHGTQVTVSS |
| 2D5 | EVQLVESGGGLVQPGGSLRLSCVASGFSLDDYGMTWVRQAPGKGLEWVSSINWSGTHTDYADSVKGRFTISRDNAKNTLFLQMNSLRSEDTAVYYCNQGWKIVPTDRGGHGTQVTVSS |
| 2F4 | EVQLVESGGGLVQPGGSLRLSCVASGFSLDDYGMTWVRQAPGKGLEWVSSINWSGTHTDYADSVKGRFTISRDNAKNTLFLQMNSLRSEDTAVYYCNQGWKIVPTDRRGHGTQVTVSS |
| 2C3 | EVQLVESGGGLVQPGGSLRLSCVASGFSLDDYGMTWVRQAPGKGLEWVSSINWSGTHTDYADSVKGRFTISRDNAKNTLFLQMNSLRSEDTAVYYCNQGWKIVPTDRTGHGTQVTVSS |
| 17E3 | EVQLVESGGGLVQAGGSLRLSCVASKMTFMRYTMGWYRQAPGKQRDLVA SIDSSGGTNYADSVKGRFTISRDNAKNTVYLEMNSLTPEDTAVYYCNQGWKIVPTDRTGHGTQVTVSS |
| 17H3 | EVQLMESGGGLVQPGGSLRLSCVASGFSLDDYGMTWVRQAPGKGLEWVSSINWSGTHTDYADSVKGRFTISRDNAKNTLFLQMNSLRSEDTAVYYCNQGWKIVPTDRGGHGTQVTVSS |
| 17D2 | EVQLVESGGGLVQPGGSLRLSCVASGFSLDDYGMTWVRQAPGKGLEWVSSINWSGTHTDYADSVKGRFTISRDNAKNTLFLQMNSLRSEDTAVYYCNQGWKIVPTDRGGHGTQVTVSS |
| 2F1 | EVQLVESGGGLVQPGGSLRLSCVASGFSLDDYGMTWVRQAPGKELEWISSINWSGTHTDYADSVKGRFTISRDNAKNTLFLQMNSLTPEDTAVYYCNQGWKIVPMDRRGHGTQVTVSS |
| 2E2 | EVQLVESGGGLVQPGGSLRLSCVASGFSLDDYGMTWVRQAPGKGLEWVSSINWSGTHTDYADSVKGRFTISRDNAKNTLFLQMNSLTPEDTAVYYCNQGWKIIPTDRRGHGTQVTVSS |
| 2C2 | EVQLVESGGGLVQPGGSLRLSCVASGFSLDDYAMTWVRQAPGKGLEWVSSINWSGTHTDYADSVKGRFTISRDNARNTLFLQMNSLTPEDTAIYYCNQGWKILPTDRRGHGTQVTVSS |
| 2E3 | EVQLVESGGGLVQPGGSLRLSCVASGFSLDDYGMTWVRQAPGKGLEWVSSINWSGTHTDYADSVKGRFTISRDNAKNTLFLQMNSLSPEDTAVYYCNQGWKILPTNRGSHGTQVTVSS |
| 13B10 | EVQLVESGGGLVQPGGSLRLSCVASGFSLDDYGMTWVRQAPGKGFEWVSSINWSGTHTDYADSVKGRFTISRDNAKNTLFLQMNSLSPEDTAVYYCNQGWKILPTNRGSHGTQVTVSS |
| 2D1 | EVQLVESGGGLVQPGGSLRLSCVASGFSLDDYGMTWVRQAPGKGLEWVSSINWSGTHTDYADSVKGRFTISRDNAKNTLFLQMNSLSPEDTAVYYCNRGWKILPTNRGSHGTQVTVSS |
| 2H3 | EVQLVESGGGLVQPGGSLRLSCVASGFSLDDYGMTWVRQAPGKGLEWVSSINWSGTHTDYADSVKGRFTISRDNAKNTLFLQMNSLTPEDTAVYYCNQGWKIIPTDRRGHGTQVTVSS |
| 2H1 | EVQLVESGGGLVQPGGSLRLSCVASGFSLDDYGMTWVRQAPGKGLEWVSSINWSGTHTDYADSVRGRFVISRDNAKNTLFLQMNSLSPEDTAVYYCNQGWKIIPTDRRGHGTQVTVSS |
| 2C1 | EVQLVESGGGLVQPGGSLRLSCVASGFSLDDYGMTWVRQAPGKGLEWVSSINWSGTHTDYADSVKGRFTISRDNAKNTLFLQMNSLTPEDTAVYYCNQGWKIIPTDRRGHGTQVTVSS |
| 15C5 | EVQLVESGGGLVQPGGSLKLSCVASGFSLDDYGMTWVRQAPGKGLEWVSSINWNVTHTDYAYSVKGRFTISRDNAKNTLFLQMNSLTPEDTAVYYCNQGWKIIPTDRRGHGTQVTVSS |
| 2B3 | EVQLVESGGGLVQPGGSLRLSCVASGFSLDDYGMTWVRQAPGKGLEWVSSINWSGTHTDCADSVKGRFTISRDNAKNTLFLQMNSLTPEDTAVYYCNQGWKIIPTDRRGHGTQVTVSS |
| 29H2 | EVQLVESGGGLVQPGGSLRLSCVASGFSLDDYGMTWVRQAPGKGLEWVSSINWSGTHTDYADSVKGRFTISRDNAKNTLFLQMNNLTPEDTAVYYCNQGWKIIPTDRRGHGTQVTVSS |
| 17E4 | EVQLVESGGGLVQPGGSLRLSCVASGFSLDDYGMTWVRQAPGKGLEWVSSINWSGTHTDYADSVKGRFVISRDNAKNTLFLQMNSLSPEDTAVYYCNQGWKIIPTDRRGHGTQVTVSS |
| 17A2 | EVQLVESGGGLVQPGGSLRLSCVASGFSLDDYAMTWVRQAPGKGLEWVSSINWSGTHTDYADSVKGRFTISRDNAKNTLFLQMNSLSPEDTAVYYCNKGWKVMPTDRGTHGTQVTVSS |
| 15D1 | EVQLVESGGGLVQPGGSLRLSCVASGFSLDDYAMTWVRQAPGKGLEWVSSINWSGTHTDYADSVKGRFTISRDNAKNTLFLQMNSLNPEDTAVYYCNQGWKVWPTDRGTHGTQVTVSS |
| 17B8 | EVQLVESGGGLVQPGGSLRLSCVASGFSLDDYGMTWVRQAPGKGLEWVSSINWSGTHTDYADSVKGRFTISRDNAKNTLFLQMNSLTPEDTAVYYCNQGWKILPAERRGHGTQVTVSS |
| 15C11 | EVQLVESGGGLVQPGGSLRLSCVASGFSLDDYGMTWVRQAPGKGLEWVSSINWSGTHTDYADSVKGRFTISRDNAKNTLFLQMNSLTPEDTAVYYCNQGWKILPAERRGHGTPVTVSS |
| 15G8 | EVQLVESGGGLVQPGGSLKLSCVASGFSLDDYGMTWVRQAPGKGLEWVSSINWSGTHTDYAYSVKGRFTISRDNAKNTLFLQMNSLTPENTAVYYCNQGWKILPAERRGHGTQVTVSS |
| 17H4 | EVQLVESGGGLVQPGGSLRLSCVASGFSLIMYAMTWVRQAPGKGLEWVSSINWSGTHTDYADSVKGRFTISRDNAKNTLFLHMNNLSPEDTAVYYCGQGWKIHPADRGGHGTQVTVSS |
| 27G8 | EVQLVESGGGLVQPGGSLRLSCVASGFSLDDYGMTWVRQAPGKGLEWVSSINWSGTHTDYADSVKGRFTISRDNAKNTLFLQMNSLTPEDTAVYYCNQGWKILPAERRGHGTQVTVSS |
| 38C6 | EVQLVESGGGLVQPGGSLRLSCVASGFSLDDYAMTWVRQAPGKGLEWVSSINWSGTHTDYADSVKGRFTISRDNAKNTLFLQMNSLTPEDTAVYYCNQGWKIRPTIPMGHGTQVTVSS |
| 2A4 | EVQLVESGGGLVQPGGSLRLSCAASGFIFDDYAMSWVRQAPGKGLEWVSAINWSGSHRNYADSVKGRFTISRDNAKKTVYLQMNSLQSEDTAVYYCGTGWQSTTKNQGYWGQGTQVTVSS |
| 15G7 | EVQLVESGGGLVQPGGSLRLSCAASGFIFDDYAMSWVRQAPGKGLEWVSAINWSGSHRNYADSVKGRFTISRDNAKKTVYLQMNSLKSEDTAVYYCATGWQSTTKNQGYWGQGTQVTVSS |
| 15B7 | EVQLVESGGGLVQPGGSLKLSCAASGFIFDDYAMSWVRQAPGKGLEWVSAINWSGSHRNYADSVKGRFTISRDNAKKTVYLQMNSLQSEDTAVYYCGTGWQSTTKNQGYWGQGTQVTVSS |
| 5G4 | EVQLVESGGGLVQPGGSLTLSCAGSGFIFDDYAMSWVRQAPGKGLEWVSSINWSGSHRNYADSVKGRFTISRDNAKKTVYLQMNSLKSEDTAVYYCATGWQSTTKNQNYWGQGTQVTVSS |
| 13B2 | EVQLVESGGSLVQPGGSLRLSCAASGFTFDDYAMSWVRQAPGKGLEWISSINWSGTHKDYADSVKGRFTISRNNANNTLYLQMNNLKFEDTAVYYCAKNWRDAGTTWFEKSGSAGQGTQVTVSS |
| 2E5 | EVQLVESGGSLVQPGESLRLSCAASGFTFDDYAMSWVRQAPGKGLEWISSINWSGTHTDYADSVKGRFTISRNNANNTLYLQMNNLKFEDTAVYYCAKNWRDAGTTWFEKSGSAGQGTQVTVSS |
| 15G1 | EVQLVESGGSLVPPGGSLRLSCAASGFTFDDYAMSWVRQAPGKGLEWVSSINWSGTHTDYTDSVKGRFTISRNNANNTLYLQMNSLKSEDTAVYYCAKNWRDAGTTWFEKSGSAGQGTQVTVSS |
| 27B1 | EVQLVESGGSLVQPGGSLRLSCAASGFTFDDYAMSWVRQAPGKGLEWISSINWSGTHTDYADSVKGRFTISRNNANNTLYLQMNNLKFEDTAVYYCAKNWRDAGTTWFEKSGSAGQGTQVTVSS |
| 17E7 | EVQLVESGGSLVQPGGSLRLSCAASGFTFDDYAMSWVRQAPGKGLEWVSSINWSGTHTDYADSVKGRFTISRNNANNTLYLQMNSLKSEDTAVYYCAKNWRDAGTTWFEKSGSAGQGTQVTVSS |
| 17D8 | EVQLVESGGSLVPPGGSLRLSCAVSGFTFDDYAMSWVRQAPGKGLEWISSINWSGTHTDYADSVKGRFTISRNNANNMLYLQMNSLKSEDTAVYYCAKNWRDAGTTWFEKSGSAGQGTQVTVSS |
| 5F8 | EVQLVESGGSLVQPGGSLRLSCAASGFTFDDYALSWVRQAPGKGLEWISSINWSGTHTDYADSVKGRFTISRNNANNTLYLQMNNLKFEDTAVYYCAKNWRDAGTTWFEKSGSAGQGTQVTVSS |
| 2D4 | EVQLVESGGSLVQPGGSLRLSCAASGFTFDDYAMTWVRQAPGKGLEWVSSINWSGTHTDYADSVKGRFTISRNNANNTLYLQMNSLKSDDTAVYYCAKNWGDAGTTWFEKSGSAGPGTQVTVSS |
| 13D8 | EVQLVESGGSLVQPGGSLRLSCAASGFTFDDYAMTWVRQASGKGLEWVSSINWSGTHTDYTDSVKGRFTISRNNANNTLYLQMNSLKSEDTAVYYCAKNWGDAGTTWFEKSGSAGQGTQVTVSS |
| 17G8 | EVQLVESGGSLVPPGGSLRLSCAASGFTFDDYAMSWVRQAPGKGLEWVSSINWSGTHTGYTDSVKGRFTISRNNANNTLYLQMNSLKSEDTAVYYCAKNWGDAGTTWFEKSGSAGQGTQVTVSS |
| 2H4 | EVQLVESGGSLVQPGGSLRLSCAASGFTFDDYAMTWVRQAPGKGLEWVSSINWSGTHTDYTDSVKGRFTISRNNANNTLYLQMNSLKSEDTAVYYCAKNWGDAGTTWFEKSGSAGQGTQVTVSS |
| 2F3 | EVQLVESGGSLVQPGGSLRLSCAASGFTFDDYAMTWVRQAPGKGLEWVSSINWSGTHTDYTGSVKGRFTISRNNANNTLYLQMNSLKSDDTAVYYCAKNWGDAGTTWFEKSGSAGQGTQVTVSS |
| 2F5 | EVQLVESGGSLVPPGGSLRLSCAASGFTFDDYAMSWVRQAPGKGLEWVSSINWSGTHTDYTDSVKGRFTISRNNANNTLYLQMNSLKSEDTAVYYCAKNWGDAGTTWFEKSGSAGQGTQVTVSS |
| 30E10 | KVQLVESGGSLVPPGGSLRLSCAASGFTFDDYAMTWVRQAPGKGLEWVSSINWSGTHTDYTDSVKGRFTISRNNANNTLYLQMNSLKSEDTAVYYCAKNWGDAGTTWFEKSGSAGQGTQVTVSS |
| 29H1 | EVQLVESGGSLVPPGGSLRLSCAASGFTFDDYAMSWVRQAPGKGLEWVSSINWSGTHTGYTDSVKGRFTISRNNANNTLYLQMNSLKSEDTAVYYCAKNWGDAGTTWFEKSGSAGQGTQVTVSS |
| 17E2 | EVQLVESGGSLVPPGGSLRLSCAASGFTFDDYGMSWVRQAPGKGLEWVSSINWSGTHTDYTDSVKGRFTISRNNANNTLYLQMNSLKSEDTAVYYCAKNWGDAGTTWFEKSGSAGQGTQVTVSS |
| 2B1 | EVQLVESGGSLVQPGGSLRLSCAASGFTFDDYAMTWVRQAPGKGLEWVSSINWSGTHTDYTDSVKGRFTISRNNANNTLYLQMNSLKSDDTAVYYCAKNWGDAGTTWFEKSGSAGPGTQVTVSS |
| 2A5 | EVQLVESGGSLVQPGGSLRLSCATSGFTFDDYAMTWVRQAPGKGLEWVSSINWSGTHTDYTDSVKGRFTISRNNANNTLYLQMNSLKSEDTAVYYCAKNWGDAGTTWFEKSGSAGQGTQVTVSS |
| 13C12 | EVQLVESGGSLVQPGGSLRLSCATSGFTFDDYAMTWVRQAPGKGLEWVSSINWSGTHTDYTDSVKGRFTISRNNANNTLYLQMNSLKSEDTAVYYCAKNWGDAGTTWFEKSGSAGQGTQVTVSS |
| 17E10 | EVQLVESGGSLVQPGGSLRLSCAASGFTFDDYAMTWVRQAPGKGLEWVSSINWSGTHTDYTDSVKGRFTISRNNANNTLYLQMNSLKSEDTAVYYCAKNWGDAGTTWFEKSGSAGQGTQVTVSS |
| 27D4 | EVQLVESGGSLVQPGGSLRLSCAASGFTFDDYAMTWVRQASGKGLEWVSSINWSGTHTDYADSVKGRFTISRNNANNTLYLQMNSLKSEDTAVYYCAKNWGDAGTTWFEKSGSAGQGTQVTVSS |
| 15F9 | EVQLVESGGSLVQPGGSLRLSCAASGFTFDDYAMTWVRQAPGKGLEWVSSINWSGTHTDYTGSVKGRFTISRNNANNTLYLQMNSLKSDDTAVYYCAKNWGDAGTTWFEKSGSAGQGTQVTVSS |
| 30H9 | EVQLVESGGSLVQPGGSLRLSCAASGFTFDDYAMTWVRQAPGKGLEWVSSINWSGTHTDYTDSVKGRFTISRNNANNTLYLQMNSLKSEDTAVYYCAKNWGDAGTTWFEKSGSAGQGTQVTVSS |
| 39C1 | EVQLVESGGSLVPPGGSLRLSCAASGFTFDDYGMSWVRQAPGKGLEWVSSINWSGTHTDYTDSVKGRFTISRNNANNTLYLQMNSLKSEDTAVYYCAKNWGDAGTTWFEKSGSAGQGTQVTVSS |
| 27G2 | EVQLVESGGSLVQPGGSLRLSCAASGFTFDDYAMTWVRQTPGKGLEWVSSINWSGTHTDYTDSVKGRFTISRNNANNTLYLQMNSLKSDDTAVYYCAKNWGDAGTTWFEKSGSAGQGTQVTVSS |
| 2D3 | EVQLVESGGSLVQPGGSLRLSCAASGFTFDDYAMSWVRQVPGKGLEWVSSINWSGTHTDYADSVKGRFTISRNNANNTLYLQMNSLKSEDTAVYYCAKNWRDAGTTWFEKSGSAGQGTQVTVSS |
| 5F7 | EVQLVESGGGLVQAGGSLRLSCAASGITFSINTMGWYRQAPGKQRELVALISSIGDTYYADSVKGRFTISRDNAKNTVYLQMNSLKPEDTAVYYCKRFRTAAQGTDYWGQGTQVTVSS |

PBMP118N121_A1_4_OK/1-127

EVQLVESGGGFVQTGGSPRLSCAASGRSFSEYAAAWFRQSPGKERDLNAGIMWDGRSLFYADSVKGRFTISRDNAKNTLHLQMNSLKPEDTAVYYCAYHKTPYTTLELNRPHAFGSWGQGTQVTVSS

OT-FPB COMPETING

| | |
|---|---|
| 47D5 | KVQLVESGGGLVQPGGSLRLSCAASGSIFGFNDMAWYRQAPGKQRELVALISRVGVTSSADSVKGRFTISRVNAKDTVYLQMNSLKPEDTAVYYCYMDQRLDGSTLAYWGQGTQVTVSS |

HER2 BINDING

| | |
|---|---|
| 14B11 | EVQLNESGGGLVQAGGSLRLSCAASGSTFSSYGMGWFRQVPGKEREFVATINWSGVTAYADSVKGRFTISRDNAKKTVYLQMNSLKPEDTARYYCGVETYGSGSSLMTEYDYWGQGTQVTVSS |
| 14B10 | EVQLVESGGGLVQAGGSLRLSCAVNSRTFSSYGMGWFRQAPGKEREFVATINWSGVTAYADSIKGRFTISRDNAKETVYLQMNSLKPDDTGVYYCAAETYGSGSSLMSEYDYWGQGTQVTVSS |
| 14B4 | EVQLVESGGGLVQAGGSLRLSCAVSSRAFSSYGMGWFRQAPGKDREFVATINWSGVTAYADSIKGRFTISRDNAKETVYLQMNSLKPEDTGVYYCAAETYGSGSSLMSEYDYWGQGTQVTVSS |
| 14C11 | EVQLVESGGGLVQAGGSLRLSCAVNSRTFSSYGMGWFRQAPGKEREFVATINWSGATAYADSIKGRFTISRDNAKETVYLQMNSLKPDDTGVYYCAAETYGSGSSLMSEYDYWGQGTQVTVSS |
| 14B5 | EVQLVESGGGLVQAGGSLRLSCAVSSRAFSSYGMGWFRQAPGKDREFVATINWSGVTAYADSIKGRFTISRDNAKETVYLQMNSLKPDDTGVYYCAAETFGSGSSLMSEYDYWGQGTQVTVSS |
| 14C6 | EVQLVESGGGSVQAGGSLRLSCVASEGTFSSYGMGWFRQAPGKERAFVATINWSGVTAYADSVKGRFTISRDNAKKTVYLQMNSLKPEDTAVYYCATDTYGSGSSLMNEYDYWGQGTQVTVSS |
| 14A4 | EVQLVESGGGSVQAGSSLTLSCVASEGTFSSYGMGWFRQAPGKERAFVATINWSGVNAYADSVKGRFTISRDNAKKTAYLQMNSLKPEDTAVYYCAAETYGSGSSLMNEYDYWGQGTQVTVSS |
| 14B3 | EVQLVESGGGLVQPGGSLTLSCVASEGTFSSYGMGWFRQAPGKERAFVATINWSGVNAYADSVKGRFTISRDNAKKTAYLQMNSLKPEDTAVYYCAAETYGSGSSLMNEYDYWGQGTQVTVSS |
| 14C1 | EVQLVESGGGSVQAGGSLRLSCAASGSTFSSYGMGWFRQAPGKERAFVATINWSGVTAYADSVKGRFTISRDNAKKTVYLQMNSLKPEDTAVYYCATETYGSGSSLMNEYDYWGQGTQVTVSS |
| 14A12 | EVQLNKSGGGLVQAGGSLRLSCAASERTFSSYGMGWFRQAPGKEREFVATINWSGVTAYADSVKGRFTISRDNAKKTVYLQMNSLKPEDTAVYYCAAEPYGSGSSLISEYDYWGHGTQVTVSS |
| 14A2 | EVQLVESGGGLVQAGGSLRLSCAASERTFSSYGMGWFRQAPGKEREFVATINWSGVTAYADSVKGRFTISRDNAKKTVYLQMNSLKPEDTAVYYCAAEPYGSGSSLISEYDYWGHGTQVTVSS |
| 14A1 | EVQLVESGGGSVQAGGSLRLSCAASERTFSSYGMGWFRQAPGKEREFVATINWSGVTAYADSVKGRFTISRDNAKKTVYLQMNSLKPEDTAVYYCAAEPYGSGSSLMSEYDYWGHGTQVTVSS |
| 17C3 | EVQLVESGGGLVQAGGSLRLSCAANGLTFRRYDMGWYRQAPGQQREWVAAISGAGDINYADSVKGRFTMARDNANHTVHLQMNSLKPEDTAVYYCNANWKMLLGVENDYWGQGTQVTVSS |
| 46D3 | KVQLVESGGGLVQAGGSLRLSCAASGRTFTEYSMGWFRQAPGKEREFVATISWNYGYTYYSDSVKGRFTVSRDIAENTVYLQMNTLKSEDTAVYYCAAKIGWLSIRGDEYEYWGQGTQVTVSS |
| 27H5 | EVQLVESGGGLVQAGGSLRLSCAASGFTFDDYGIGWFRQASGKEREGVSCITSSDGSTYYADSVKGRFTISSDNAKNTVYLQMNSLKPEDTAVYYCAALPFVCPSGSYSDYGDEYDYWGQGTQVTVSS |
| 17C2 | EVQLVESGGGLVQPGGSLRLSCAASGFAFSSYAMSWVRQAPGKGLEWVSAVDSGGGRTDYAHSVKGRFTISRDNAKNTLYLQMSSLKPEDTALYYCTKHVSDSDYTEYDYWGQGTQVTVSS |
| 17D11 | EVQLVESGGGLVQAGGSLRLSCTASGRTSSTSAMGWFRQAPGKEREFVATISRGGSATYYADLKKGRFTISRDNAKNTLYLQMNSLKPEDTAVYYCAARRSSLYTSSNVFEDYWGQGTQVTVSS |
| 15A6 | EVQLVESGGGLVQAGGSLRLSCVTSRRPASTRTMAWYRQAPGKQRDWVATISSHGLPVYADSVKGRFTVSRDNANNTVYLQMNTLKPEDTAVYYCRDVNADYWGQGTQVTVSS |
| 17B6 | EVQLVESGGGLVQPGGSLRLSCAASRIPFSTRTMAWYRQAPGKQRDWVATIGTSGPPRYADSVKGRFTVSRDNAKNTVYLQMNSLKAEDTAVYYCWDVNADYWGQGTQVTVSS |
| 17C5 | EVQLVESGGGLVQAGGSLRLSCVTSRRPASTRTMAWYRQAPGKQRDWVATISSHGLPVYADSVKGRFTVSRDNANNTVYLQMNTLKPEDTAVYYCRDVNADYWGQGTPVTVSS |
| 15E11 | EVQLVESGGGLVQAGGSLRLSCVASRIPFSSRTMAWYRQAPGKQRDWVATISARGMPAYEDSVKGRFTVSRDNAKNTLYLQMNSLKPEDTAVYYCRDVNADYWGQGTQVTVSS |
| 15C2 | EVQLVESGGGLVQAGGSLRLSCVTSRRPASTRTMAWYRQAQGKQRDWVATISSHGLPVYADSVKGRFTVSRDNANNTVYLQMNTLKPEDTAVYYCRDVNADYWGQGTQVTVSS |
| 2A3 | EVQLVESGGGLVQAGGSLNLSCVASGIPFSTRTMAWYRQAPGKPRDWVA TIRNGAPVYADSVKGRFTVSRDNAKNTLYLQMNSLKPEDTATYYLCRDVNGDIWQGTQVTVSS |
| 27A5 | EVQLVESGGGLVQAGGSLNLSCVASGIPFSTRTMAWYRQPPGNERDWVA TIRSGAPVYADSVKGRFTVSRDNAKNTLYLQMNSLEPEDTATYYCWDVNGDIWGQGTPVTVSS |
| 2C5 | EVQLVESGGGLVQAGGSLNLSCVASGIPFSTRTMAWYRQTPGKSRDWVA TIRSGTPVYADSVKGRFTVSRDNAKNTLYLRMNSLKSEDSATYTCRAVNADIWGQGTQVTVSS |
| 27G5 | EVQLVESGGGLVQPGGSLRLSCVASRIPASIRTMAWYRQTPGNQRDWLATIGSSGTPAYADSVKGRFTVSRDNAKNTVYLQMNSLKPEDTAVYYCRDVNGDYWGQGTQVTVSS |
| 13A9 | EVQLVESGGGLVQAGGSLRLSCVASRIPASIRTMAWYRQAPGKQRDWVATIGTGGTPAYADSFKGRFTVSRDNANHTVYLQMNSLKPEDTAVYYCRDVNGDYWGQGTQVTVSS |
| 29E9 | EVQLVESGGGLVQPGGSLRLSCVASRIPASIRTMAWYRQTPGNQRDWLATIGSSGTPAYADSVKGRFTVSRDNAKNTVYLQMNSLKPEDTAVYYCRDVNGDYWGQGTQVTVSS |
| 15D8 | EVQLVESGGGLVQPGGSLKLSCVASTIPASIRTMAWYRQTPGNQRDWLATIGSSGTPAYADSVKGRFTVSRDNAKNTVYLQMNSLKPEDTAVYYCRDVNGDYWGQGTQVTVSS |
| 15G4 | EVQLVESGGGLVQAGGSLRLSCVASGIPFRSRTMAWYRQAPGKTRDWVATIGTHGTPLYADSVKGRFTVSRDNAKNTLYLQMNSLKPEDTAVYYCWDVNGDYWGQGTQVTVSS |
| 15D12 | EVQLVESGGGLVQAGESLRLSCATSGITFKRYVMGWYRQGPGKQRELVATVNDGGTTSYADSVKGRFAISRDNAKNTAYLQMNSLKAEDTAVYYCNAVWKLPRFVDNDYWGQGTQVTVSS |
| 15E12 | EVQLVESGGGLVQAGGSLRLSCAANGLTFRRYDMGWYRQAPGQQREWVAAISGAGDINYADSVKGRFTMARDNANHTVHLQMNSLKPEDTAVYYCNANWKMLLGVENDYWGQGTQVTVSS |
| 13D7 | EVQLVESGGGLVQAGGSLRLSCAANGLTFRRYDMGWYRQAPGQQREWVAAISGAGDINYADSVKGRFTMARDNANHTVHLQMNSLKPEDTAVYYCNANWKMLLGVENDYWGQGTQVTVSS |
| 13A8 | EVQLVESGGGLVQPGGSLRLSCAASGLGIAFSRRTMAWYRQAPGKQRDWVATIAGDGSTV YADSMKGRFTISRDNAENTVYLQMNSLKPEDTAVYYCWDVNRDYWGQGTQVTVSS |
| 15A4 | EVQLVESGGGLVQPGGSLRLSCAASGLGIAFSRRTMAWYRQAPGKQRDWVATIAGDGSTV YADSMKGRFTISRDNAKNTVYLQINSLKPEDTAVYYCWDVNRDYWGQGTQVTVSS |
| 17F7 | EVQLVESGGGLVQAGGSLRLSCVASGIAQS IRVMAWYRQPPGKQRDWVGTISSDGTAN YADSVKGRFTISRDNAKKTMYLQMNSLKPDDTAVYYCRDVNRDYWGQGTQVTVSS |
| 15C8 | EVQLVESGGGLVQAGGSLRLSCAASGIAFR IRTMAWYRQAPGKQRDWVATSDSGGTTL YADSVKGRFTVSRDNAENTVYLQMNSLKPEDTAVYYCRDVNRDYWGQGTQVTVSS |
| 17A10 | EVQLVESGGGLVQAGGSLRLSCVASGIPSI RAIAWYRQAPGKQRDWVATSGTGYGAT YDDSVKGRFTLSRDNAKNTVYLQMNSLKPEDTAVYYCRDVNRDYWGQGTQVTVSS |
| 27D3 | EVQLMESGGGLVQPGGSLRLSCAASGLGIAFSRRTMAWYRQAPGKQRDWVATIAGDGSTV YADSMKGRFTISRDNAENTVYLQMNSLKPEDTAVYYCWDVNRDYWGQGTQVTVSS |
| 13B12 | EVQLVESGGGLVQAGGSLRLSCAASGIAFR IRTMAWYRQAPGKQRDWVATIGSDGTTI YADSVKGRFTLSRHNAENTVYLQMNSLKPEDTAVYYCRDVNRDYWGQGTQVTVSS |
| 15B2 | EVQLVESGGGLVQAGGSLRLSCVVSGIPSS IRAMAWYRQAPGRQRDWVATIYSPSGSAVYADSVKGRFTISSDNAKSTIYLQMNSLKPDDTAVYYCRDVNRDYWGQGTQVTVSS |
| 15B11 | EVQLVESGGGSVQAGGSLRLSCVVSGIPSS IRAMAWYRQAPGRQRDWVATIYSRSGGAVYADSVKGRFTISSDNAKNTIYLQMNSLKPDDTAVYYCRDVNRDYWGQGTQVTVSS |
| 13C9 | EVQLVESGGGLVQAGGSLRLSCVASGIPSI HAMAWYRQAPGKQRDWGATTYSRGG TTYNDSAKGRFTISRDNAKKTVYLQMNSLKPEDTAVYYCRDVNRDYWGQGTQVTVSS |
| 17D5 | EVQLVESGGGLVQPGGSLRLSCAASGIIGT IRTMAWYRQAPGKQRDWVA SIGTRGAPVYADSVNGRFTISRDGATNTVFLQMNNLKPEDTAVYYCRDVNRDYWGQGTQVTVSS |
| 27B5 | EVQLVESGGGLVQAGGSLRLPCAASGIAFR IRTMAWYRQAPGKQRDWVA TSDSGGTTLYADSVKGRETVSRDNAENTVYLQMNSLKPEDTAVYYCRDVNRDYWGQGTQVTVSS |
| 27C7 | EVQLVESGGGLVQAGGSLRLSCAASGIAFR IRTMAWYRQAPGKQRDWVA TSDSGGTTLYADSVKGRFTVSRDNADNTVYLQMNSLKPEDTAVYYCRDVNRDYWGQGTQVTVSS |
| 13D4 | EVQLVESGGGLVQAGGSLRLSCVVSGIPSS IRAMAWYRQAPGRQRDWVA TIYSPSGSAVYADSVKGRFTISSDNAKSTIYLQMNSLEPDDTAVYYCRDVNREYWGQGTQVTVSS |
| 15G5 | EVQLVESGGGLVQAGGSLRLSCVVSGIPST IRAMAWYRQAPGRQRDWVA TIYSPSGSAVYADSVKGRFTISSDNAKKTIYLQMNSLKPDDTAVYYCRDVNREYWGQGTQVTVSS |
| 13C4 | EVQLVESGGGLVQAGGSLRLSCVVSGIPSS IRAMAWYRQAPGRQRDWVA TIYSPSGSAVYADSVKGRFTISSDNAKSTIYLQMNSLKPDDTAVYYCRDVNREYWGQGTQVTVSS |
| 46G1 | EVQLVESGGGLVQAGGSLRLSCAASGRTFSDDAMGWFRQAPGKERECVASLYLNGDYPYYADSVKGRFTISRDNAKNAVILQMNNLKTEDTAVYYCAAKPGWVARDPSQYNYWGQGTQVTVSS |
| 46E4 | EVQLVESGGGLVQAGGSLRLSCAASGRAFKDDAVGWFRQAPGKERECVASMYLDGDYPYYADSVKGRFTISRDNAKNAVILQMNNLKTEDTAVYYCAAKPGWVARDPSEYNYWGQGTQVTVSS |
| 17B5 | EVQLVESGGGLVQTGGSLRLSCAASGSTFRTDMMGWYRQAPGKQREFVASITKFGSTNYADSVKGRFTISNDNAKDTVYLQMNSLKSEDTAVYYCRNFNRDLWGQGTQVTVSS |
| 15C9 | EVQLVESGGGLVQAGGSLKLSCVNSGIPSTLRAMAWYRQAPGRQRDWVATSSNTGGTTYDDSVKGRFTISRDNAKNTVYLQMNSLKPEDTGVYYCRDVNRDLWGQGTQVTVSS |
| 13D10 | EVQLVESGGGLVQPGGSLRLSCAASSVITLDSNAIGWFRQAPGKEREEVSCIASSDGSTYYAESVKGRFTISKDYTRNTVYLQVNSLKPEDTAVYHCATDANPNCGLNVWNSWGQGTQVTVSS |
| 17C6 | EVQLVESGGGLVQAGGSLTLSCAASGSTSSLDIMAWYRQAPEKQRELVASVSGGGNSDYASSVKGRFTISGDTAKSTLYLQMNSLKPEDTAMYYCYGRDYYYMPFWGQGTQVTVSS |
| 15A2 | EVQLVESGGGLAQAGGSLSLSCAASGRFFS TRVMAWYRQTPGKQREFVASMRGSGSTNYADSARGRFAISRDNAKNTVYLQMNSLKPEDTAVYYCRDINEDQWGQGTQVTVSS |
| 17A8 | EVQLVESGGGLVQAGGSLSLSCAASGRFFS TRVMAWYRQTPGKQREFVASMRGSGSTNYADSVRGRFAISRDNAKNMVYLQMNTLKPEDTAVYYCRDINEDQWGQGTQVTVSS |
| 15G10 | EVQLVESGGGLVQAGGSLSLSCAASGRFFS TRVMAWYRQTPGKQREFVASMRGSGSTNYADSARGRFAISRDNAKNTVYLQMNSLKPEDTAVYYCRDINEDQWGQGTQVTVSS |
| 27A3 | EVQLVESGGGLVQAGGSLSLSCVASGRFFS TRVMAWYRQTPGKQREFVASMRGSGSTNYADSVRGRFAISRDNAKNTVYLQMNTLKPEDTAVYYCRDINEDQWGQGTQVTVSS |
| 17H10 | EVQLVESGGGLVQAGGSLSLSCSASGRFFS TRVMAWYRQTPGNQREFVATIHSSGSTIYADSVRGRFAISRDNAKNTVYLQMRSLKPEDTAVYYCRDINADQWGQGTQVTVSS |
| 30D10 | EVQLVESGGGLVQAGGSLTLSCTASETTVR IRTMAWYRQPPGNQREWVATIGSNGFATYPDSVKGRFTISRDNAKNTVYLQMNSLKPEDTAVYYCRDINRDIWGQGSQVTVSS |
| 15H4 | EVQLVESGGGLVQAGGSLTLSCAPSESTVS FNTVAWYRQAPGEQREWVATISRQGMSTYPDSVKGRFTISRDNAKNTVYLQMNNLKPEDTAVYYCRDINHDIWGRGSQVTVSS |
| 17B7 | EVQLVESGGGLVQAGGSLRLSCAASGIISS FRTMAWYRQAPGKQRDWVATIGSDGLANYADSVKGRFTISRDNAKKTVYLQMNSLKPEDTAVYFCRDINRDYWGQGTQVTVSS |
| 15D2 | EVQLVESGGGLVQAGGSLRLSCVVSGVFGP IRAMAWYRQAPGKQRDWVATIGSSGHPVYTDSVKGRFTFSKDGAKNTVYLQMNSLKPEDTAVYYCRDINRDYWGQGTQVTVSS |
| 17G5 | EVQLVESGGGLVQPGGSLRLSCAASGIGIAFSSRTMAWYRQAPGKQRDWVATIGSGGTTNYADSVKGRFTISRDNAKNTVYLQMNSLKPEDTAVYYCRDINRDYWGQGTQVTVSS |
| 15B6 | EVQLVESGGGLVQPGGSLRLSCAASGIIGS FRTMAWYRQAPGNQRDWVATIGSRGLASYADSVRGRFTLSRDNAKKTVYLQMNSLKPEDTAIYYCRDINGDYWGQGTQVTVSS |
| 27F2 | EVQLVESGGGLVQAGGSLRLSCAASGIISSFRTLAWYRQAPGKQRDWVATISSAGGTAYADAVKGRFTISISRDNVEYTVDLQMDSLKPEDTAVYYCRDINGDYWGQGTQVTVSS |
| 17F5 | EVQLVESGGGLVQPGGSLRLSCAASGLGIAFSRRTMAWYRQAPGKQRDWVATIAGDGSTVYADSMKGRFTISRDNAKNTVYLQVNSLKPEDTAVYYCWDTNGDYWGQGTQVTVSS |
| 17B2 | EVQLVESGGGLVQPGGSLRLSCAGSGFTFSNYAMTWVRQAPGKGLEWVSGVGGDGVGSYADSVKGRFTISRDNAKNTLYLQMNSLKPEDTALYYCTKDISTFGWGPFDYWGQGTQVTVSS |
| 27H4 | EVQLVESGGGLVQAGGSLRLSCVASKMTFMRYTMGWYRQAPGKQRDLVASIDASGGTNYADSVKGRFTISRDNAKNTVYLEMNSLKPEDTGVYYCNGRWDIVGAIWWGQGTQVTVSS |
| 13A4 | EVQLVESGGGLVQAGGSLRLSCVASKMTFMRYTMGWYRQAPGKQRDLVASIDSSGGTNYADSVKGRFTISRDNAKNTVYLEMNSLKPEDTGVYYCNGRWDIVGAIWWGQGTQVTVSS |
| 2A1 | EVQLVESGGGLVQAGGSLRLSCVASKITFRRYIMDWYRQAPGKQRELVASINSDGSTGYTDSVKGRFTISRDNTKNTLDLQMNSLKPEDTAVYYCHGRWLEIGAEYWGQGTQVTVSS |
| 15E10 | EVQLVESGGGLVQAGGSLKLSCVASGITFFRYTMGWYRQAPGKERELVAEISSADEPSFADAVKGRFTISRDNAKNTVVLQMNGLKPEDTAVYYCKGSWSYPGLTYWGKGTLVTVSS |
| 27E7 | EVQLVESGGGLVQAGGSLRLSCAASGITFRRYDMGWYRQFPGKERELVATILSEGDTNYVDPVKGRFTISRDNAKNTVYLQMNDLKPEDTAVYYCNGVWRAIGRTYWGQGTQVTVSS |
| 47E5 | EVQLVESGGGLVQAGGSLRLSCAASASIFGFDSMGWYRQAPGNERILVAIISNGGTTSYRDSVKGRFTIARDNAKNTVSLQMNSLKPEDTAVYYCNLDRRSYNGRQYWGQGTQVTVSS |
| 2G4 | EVQLVESGGGLVQAGGSLRLSCAASGNIFSHNAMGWYRQAPGKQRELVTYITINGIANYVDSVKGRFTISRDNTKNTMYLQMVSLKPEDTAVYYCNVGGREYSGVYYYREYWGQGTQVTVSS |
| 14D4 | EVQLVESGGGLVQAGDSLRLSCAASGRALDTYVMGWFRQAPGDGREFVAHIFRSGITSYASSVKGRFTISRDNAKNTVYLQMASLKPEDTAAYYCAARPSDTTWSESSASWGQGTQVTVSS |
| 17A5 | EVQLVESGGGLVQPGGSLRLSCAASGFTFDDYSMSWVRQATGKGLEWVSGISWNGGSTNYADSVKGRFTISRDNVKNTLYLQMNSLKSEDTAVYYCAKDLGNSGRGPYTNWGQGTQVTVSS |
| 15D10 | EVQLVESGGGLVQPGGSLKLSCAASGFTFSSYRMYWVRQAPGKGLEWVSAIKPDGSITYYADSVKGRFTISRDNAKNTVYLQMNSLKPEDTAVYYCATDCGVPGFGWTFSSWGQGTQVTVSS |
| 13C2 | EVQLVESGGGLVQAGGSLRLSCAASGSTFSINRMAWYRQSPGKQRELVAAVDNDDNTEYSDSVAGRFTISRDNAKNAVHLQMNSLRLEDTAVYYCNAKQLPYLQNFWGQGTQVTVSS |
| 17G11 | EVQLVESGGGLVQAGGSLRLSCAASGSTFSINRWGWYRQAPGKQRELVAAIDDGGNTEYSDFVNGRFTISRDNPETAVHLQMNSLKLEDTAVYYCNAKQLPYLQNFWGQGTQVTVSS |
| 17A3 | EVQLVESGGGLVQAGGSLSLSCAASATLHRFDNNWYRQAPGKQRELVATIAHDGSTNYANSVKGRFTISRDNARDTLFLQMHALQPEDTAVYMCNLHRWGLNYWGQGTQVTVSS |
| 27B7 | EVQLVESGGGLVQPGGSLRLSCAASGFTFSSYAMSWVRQAPGKGLEWVSAISSGGGSITTYADSVKGRFTISRDNAKNTLYLQMSSLKPEDTALYYCAKARSSSSYYDFGSWGQGTQVTVSS |
| 17A6 | EVQLVESGGGLVQPGGSLRLSCAASGFTFSSYAMSWVRQAPGKGLEWVSAISSGGGSITTYADSVKGRFTISTDNAKNTLYLQMSSLKPEDTALYYCAKARSSSSYYDFGSWGQGTQVTVSS |
| 17D7 | EVQLVESGGGLVQPGGSLRLSCAASGFTLDYCAIGWFRQAPGKEREGVSCISSSDGSTYYADSVKGRFTISRDNAKNTVYLQMNSLKPEDTAVYYCATDRGSGTCYADFGSWGQGTQVTVSS |
| 46D4 | EVQLVESGGGLVQPGGSLRLSCAASGFIFDDYAMSWVRQAPGKGLEWVSSINWSGTHTDYAEDMKGRFTISRDNAKKTLYLQMNSLQSEDTAVYYCAKGWGPAVTSIPVATLGTQVTVSS |
| 27B3 | EVQLVESGGGLVQAGGSLTLSCTASETTV RIRTMAWYRQPPGNQREWVATIGSNGFATYPDSVKGRFTISRDNAKNTVYLQMNSLKPEDTAVYYCRDINRDIWGQGSQVTVSS |
| 27E5 | EVQLVESGGGLVQAGGSLTLSCTASETTV RIRTMAWYRQPPGNQREWVATIGSNGFATYPDSVKGRFTISRDNAKNTVYLQMNSLKPEDTAVYYCRDINRDIWGQGSQVTVSS |
| 27D6 | EVQLVESGGGLVQAGGSLTLSCTASETTV RIRTMAWYRQPPGNQREWVATIGSNGFATYPDSVKGRFTISRDNAKNTVYLQMNSLKPEDTAVYYCRDINRDIWGQGSQVTVSS |
| 30D10 | EVQLVESGGGLVQAGGSLTLSCTASETTV RIRTMAWYRQPPGNQREWVATIGSNGFATYPDSVKGRFTISRDNAKNTVYLQMNSLKPEDTAVYYCRDINRDIWGQGSQVTVSS |
| 47G11 | EVQLVESGGGLVQPGGSLRLSCAASGRIFYPMGWFRQAPGKEREFVAAIGSGDIITYYADSVKGRFTISRDNAKNTVYLQMNSLKPEDTAVYYCASSRDYSRSRDPTSYDRWGQGTQVTVSS |
| 27C3 | EVQLVESGGGLVQPGGSLRLSCAASGFTFDDYATSWVRQAPGKGPEWVSAINSGGGSTYYADSVKGRFTISRDNAKNTLYLQMNSLKPEDTAVYYCARPRGSSLYLLEYDYWGQGTQVTVSS |

TABLE C-2
k_{off} rate of different Nanobodies as measured in Biacore

| ID | k_{off} (s⁻¹) |
|---|---|
| 2A4 | 2.05E−03 |
| 2A5 | 1.42E−03 |
| 2A6 | 1.65E−03 |
| 2B1 | 1.55E−03 |
| 2C4 | 1.26E−03 |
| 2D2 | 1.61E−03 |
| 2D4 | 1.65E−03 |
| 2F2 | 1.65E−03 |
| 2F3 | 1.53E−03 |
| 2F5 | 1.57E−03 |
| 2G5 | 1.56E−03 |
| 2H4 | 1.61E−03 |
| 2B2 | 1.19E−03 |
| 2B3 | 1.25E−03 |
| 2B4 | 2.77E−03 |
| 2B5 | 1.15E−03 |
| 2C1 | 1.18E−03 |
| 2C2 | 4.12E−03 |
| 2C3 | 1.11E−03 |
| 2D1 | 1.27E−03 |
| 2D5 | 1.20E−03 |
| 2F1 | 1.77E−03 |
| 2F4 | 1.07E−03 |
| 2G1 | 1.23E−03 |
| 2G2 | 1.30E−03 |
| 2G3 | 1.20E−03 |
| 2H1 | 1.09E−03 |
| 2H2 | 1.18E−03 |
| 2H3 | 1.15E−03 |
| 2H5 | 1.21E−03 |

TABLE C-3
Overview of k_{d}/k_{off}-, kₐ-, and K_{d}-values for binding of Nanobodies
2D3, 5F7 and 47D5 to HER2. Fusion of a dummy Nanobody at the
N-terminal end of the Nanobodies 2D3 and 47D5 does not significantly
impact on the binding characteristics of 2D3 or 47D5 respectively.

| Nanobody ID | k_{off} (s⁻¹) | Kₒₙ (1/Ms) | K_{D} (nM) |
|---|---|---|---|
| 2D3 | 1.48E−03 | 1.36E+06 | 1.09 |
| Dummy-2D3 | 1.13E−03 | 1.16E+06 | 1.77 |
| 5F7 | 3.02E−04 | 1.02E+06 | 0.29 |
| 47D5 | 8.62E−04 | 3.86E+05 | 2.23 |
| Dummy-47D5 | 8.69E−04 | 2.71E+05 | 3.21 |

TABLE C-4
Off-rate analysis of HER2-ECD on 2D3, 47D5 and
2D3-35GS-47D5 coated sensor chips

| Analyte | Protein on sensor chip | k_{off} (1/s) |
|---|---|---|
| 100 nM Her2 ECD | 2D3-47D5 | 8.07E−5 |
| 100 nM Her2 ECD | 2D3 | 2.10E−3 |
| 100 nM Her2 ECD | 5F7 | 2.56E−3 |
| 1000 nM Her2 ECD | 2D3-47D5 | 5.45E−5 |
| 1000 nM Her2 ECD | 2D3 | 1.51E−3 |
| 1000 nM Her2 ECD | 5F7 | 1.31E−3 |

TABLE C-5

Oligonucleotide primers used for generation of
Omnitarg light chain V_{L} + C_{L} by overlap extension

| | | | |
|---|---|---|---|
| For-sequences | SEQ ID NO | Rev-sequences | SEQ ID NO |

| | | | |
|---|---|---|---|
| >For_LCrescuepAX51 | 2396 | >Rev_LC1pAX51 | 2408 |
| tgattacgccaagct | | TAATAACAATCCAGCGGCTGCCGTAG | |
| | | GCAATAGGTATTTCATGTTGAAAATC | |
| | | T | |
| >For_LC1pAX51 | 2397 | >Rev_LC2_OT | 2409 |
| tgattacgccaagcttgcatgca | | ATCGCCGACGGACGCGCTCAGGCTAC | |
| aattctatttcaaggagattttc | | TCGGAGATTGCGTCATCTGGATGTCG | |
| aacatga | | GC | |
| >For_LC2pAX51_OT | 2398 | >Rev_LC3_OT | 2410 |
| gctggattgttattactcgcggc | | CCGGCTTCTGTTGATACCAAGCAACC | |
| ccagccggccatggccGACATCC | | CCGATAGATACGTCCTGACTTGCT | |
| AGATGACG | | | |
| >For_LC3_OT | 2399 | >Rev_LC4_OT | 2411 |
| GCGTCCGTCGGCGATCGCGTTAC | | CCGCTGAAACGGGAAGGCACACCGGT | |
| CATCACATGCAAAGCAAGTCAGG | | GTAACGATATGATGCGGAGTAAAT | |
| ACGT | | | |
| >For_LC4_OT | 2400 | >Rev_LC5_OT | 2412 |
| ATCAACAGAAGCCGGGCAAGGCT | | ATAGTAGGTGGCGAAGTCCTCTGGCT | |
| CCGAAATTGCTCATTTACTCCGC | | GCAGGCTAGAGATAGTCAGGGTAA | |
| ATCA | | | |
| >For_LC5_OT | 2401 | >Rev_LC6_OT | 2413 |
| TTCCCGTTTCAGCGGAAGCGGCT | | TACCGTACGTTTAATTTCCACTTTCG | |
| CGGGTACTGATTTTACCCTGACT | | TACCCTGGCCAAAGGTATACGGGT | |
| ATCT | | | |
| >For_LC6_OT | 2402 | >Rev_LCrescue_VL_OT | 2414 |
| TTCGCCACCTACTATTGTCAGCA | | TCGGAAGGCGGAAAG | |
| ATACTATATTTACCCGTATACCT | | | |
| TTGG | | | |
| >For_LC7_OT | 2403 | >Rev_LC7 | 2415 |
| ATTAAACGTACGGTAGCTGCCCC | | ATACGACGCTGGCCGTACCACTTTTC | |
| TAGCGTGTTTATCTTTCCGCCTT | | AGCTGCTCGTCGGAAGGCGGAAAG | |
| CCGA | | | |
| >For_LC8 | 2404 | >Rev_LC8 | 2416 |
| CGGCCAGCGTCGTATGTTTACTG | | CCGGACTGCAGTGCATTATCCACTTT | |
| AATAACTTCTATCCGCGCGAAGC | | CCATTGGACTTTAGCTTCGCGCGG | |
| TAAA | | | |
| >For_LC9 | 2405 | >Rev_LC9 | 2417 |
| TGCACTGCAGTCCGGCAATTCTC | | GGTCAGGGTAGAGCTCAGTGAGTAAG | |
| AAGAATCCGTGACGGAACAAGAT | | TGCTATCTTTGCTATCTTGTTCCG | |
| AGCA | | | |
| >For_LC10 | 2406 | >Rev_LC10 | 2418 |
| AGCTCTACCCTGACCTTGTCAAA | | GAAAGTCCCTGATGGGTCACTTCACA | |
| GGCAGATTATGAAAAACACAAAG | | GGCGTAAACTTTGTGTTTT | |
| TTTA | | | |
| >For_LC11 | 2407 | >Rev_LC11 | 2419 |
| CCATCAGGGACTTTCGAGTCCGG | | aaatagaattggcgcgccttattaGC | |
| TTACAAAGTCTTTTAACCGCGG | | ACTCACCGCGGTTAAAAGAC | |
| | | >Rev_LCrescue | 2420 |
| | | aaatagaattggcgc | |

TABLE C-6

Oligonucleotide primers used for generation of
Omnitarg heavy chain V_{H} + CH₁ by overlap extension

| | SEQ ID | | SEQ ID |
|---|---|---|---|
| For | NO | Rev | NO |
| >For_HCrescue | 2421 | >Rev_HC1 | 2434 |
| gtgctaataaggcgc | | AAAGGTACCACTAAAGGAATTGCGAA | |
| | | TAATAATTTTTTCACTATGACTGT | |
| >For_HC1 | 2422 | >Rev_HC2_OT | 2435 |
| gtgctaataaggcgcgccaattctat | | ACGCAGAGAACCGCCTGGCTGCACCA | |
| ttcaaggagacagtcatagtgaaa | | GCCCACCTCCGCTTTCCACCAGCT | |
| >For_HC2_OT | 2423 | >Rev_HC3_OT | 2436 |
| tttagtggtacctttctattctcact | | TTTCACGTTCACTGATTATACCATGG | |
| ccGAGGTTCAGCTGGTGGAAAGCG | | ATTGGGTTCGCCAGGCGCCGGGTA | |
| >For_HC3_OT | 2424 | >Rev_HC4_OT | 2437 |
| GGCGGTTCTCTGCGTCTGAGCTGCGC | | CCCTTAAAACGTTGGTTGTAAATTGA | |
| TGCCTCCGGTTTCACGTTCACTGA | | GCCACCAGAGTTAGGGTTTACGTC | |
| >For_HC4_OT | 2425 | >Rev_HC5_OT | 2438 |
| GCCAGGCGCCGGGTAAAGGCCTTGAA | | TTCTGCACGCAGCGAATTCATCTGTA | |
| TGGGTGGCCGACGTAAACCCTAAC | | AATAGAGTGTGTTTTTAGAGCGAT | |
| >For_HC5_OT | 2426 | >Rev_HC6_OT | 2439 |
| CCAACGTTTTAAGGGTCGTTTCACCC | | TGCCTTGGCCCCAATAGTCAAAGTAA | |
| TGAGCGTAGATCGCTCTAAAAACA | | AAGGACGGGCCCAGATTGCGTGCA | |
| >For_HC6_OT | 2427 | >Rev_HC7 | 2440 |
| TCGCTGCCTGCAGAAGACACCGCTGT | | GATTTCGAGCTTGGGGCCAGCGGAAA | |
| TTATTACTGTGCACGCAATCTGGG | | CACTGACGGACCTTTAGTGCTTGC | |
| >For_HC7_OT | 2428 | >Rev_HCrescue_VH_OT | 2441 |
| ATTGGGGCCAAGGCACGTTGGTCACC | | GATTTCGAGCTTGGG | |
| GTGAGTAGCGCAAGCACTAAAGGT | | | |
| >Rev_HC7_OT_PCR | 2429 | >Rev_HC8 | 2442 |
| ACCTTTAGTGCTTGCGCTACTCACGG | | GGAGACAGTGACCGGTTCCGGGAAGT | |
| TGACCAACGTGCCTTGGCCCCAAT | | AATCTTTCACCAGACAGCCCAGCG | |
| >For_HC8 | 2430 | >Rev_HC9 | 2443 |
| CCCAAGCTCGAAATCCACGTCCGGTG | | TATACAAGCCGCTAGACTGCAAAACC | |
| GCACCGCCGCGCTGGGCTGTCTGG | | GCAGGGAAAGTATGTACACCCGAG | |
| >For_HC9 | 2431 | >Rev_HC10 | 2444 |
| CCGGTCACTGTCTCCTGGAACTCGGG | | TGGTTCACATTGCAAATATACGTCTG | |
| TGCACTTACCTCGGGTGTACATAC | | GGTGCCCAGAGAGCTTGAAGGCAC | |
| >For_HC10 | 2432 | >Rev_HC11 | 2445 |
| CTAGCGGCTTGTATAGCCTGTCAAGC | | TTTTTGTTCTGCGGCCGCACAGCTCT | |
| GTTGTGACCGTGCCTTCAAGCTCT | | TCGGTTCCACTTTCTTATCCA | |
| >For_HC11 | 2433 | >Rev_HCrescue | 2446 |
| TTGCAATGTGAACCACAAACCGAGTA | | TTTTTGTTCTGCGGC | |
| ACACCAAAGTGGATAAGAAAGTGG | | | |

1. Amino acid sequence essentially consisting of a domain antibody, of a single domain antibody, of a “dAb” or of a Nanobody®, that is directed against and/or that can specifically bind to HER2 and/or wherein said amino acid sequence inhibits and/or blocks binding of Herceptin® to HER2.

2.-43. (canceled)

44. Amino acid sequence according to claim 1, that essentially consists of a Nanobody® that
i) has at least 80% amino acid identity with at least one of the amino acid sequences of SEQ ID NO's: 1 to 22 or 2051-2325, in which for the purposes of determining the degree of amino acid identity, the amino acid residues that form the CDR sequences are disregarded;
and in which:
ii) preferably one or more of the amino acid residues at positions 11, 37, 44, 45, 47, 83, 84, 103, 104 and 108 according to the Kabat numbering are chosen from the Hallmark residues mentioned in Table A-3.

45. (canceled)

46. Amino acid sequence according to claim 1, that essentially consists of a partially humanized or fully humanized Nanobody®.

47.-77. (canceled)

78. Amino acid sequence according to claim 1, that essentially consists of 4 framework regions (FR1 to FR4, respectively) and 3 complementarity determining regions (CDR1 to CDR3, respectively), in which:
CDR1 is chosen from the group consisting of:
a) the amino acid sequences of SEQ ID NO's: 401-463;
b) amino acid sequences that have at least 80% amino acid identity with at least one of the amino acid sequences of SEQ ID NO's: 401-463;
c) amino acid sequences that have 3, 2, or 1 amino acid difference with at least one of the amino acid sequences of SEQ ID NO's: 401-463
and/or
CDR2 is chosen from the group consisting of:
d) the amino acid sequences of SEQ ID NO's: 951-1013;
e) amino acid sequences that have at least 80% amino acid identity with at least one of the amino acid sequences of SEQ ID NO's: 951-1013;
f) amino acid sequences that have 3, 2, or 1 amino acid difference with at least one of the amino acid sequences of SEQ ID NO's: 951-1013;
and/or
CDR3 is chosen from the group consisting of:
g) the amino acid sequences of SEQ ID NO's: 1501-1563;
h) amino acid sequences that have at least 80% amino acid identity with at least one of the amino acid sequences of SEQ ID NO's: 1501-1563;
i) amino acid sequences that have 3, 2, or 1 amino acid difference with at least one of the amino acid sequences of SEQ ID NO's: 1501-1563.

79. (canceled)

80. Amino acid sequence according to claim 78, that is a Nanobody chosen from the group consisting of SEQ ID NO's: 2051-2113 or from the group consisting of amino acid sequences that have more than 80% preferably more than 90% amino acid identity, more preferably more than 95%, such as 99% or more sequence identity with at least one of the amino acid sequences of SEQ ID NO's: 2051-2113.

81. Amino acid sequence that cross-blocks the binding of at least one of the amino acid sequences according to claim 78 to HER2 and/or that is cross-blocked from binding to HER2 by at least one of the amino acid sequences according to claim 78.

82.-150. (canceled)

151. Compound or construct, that comprises or essentially consists of one or more amino acid sequences according to claim 1, and optionally further comprises one or more other groups, residues, moieties or binding units, optionally linked via one or more linkers.

152.-160. (canceled)

161. Compound or construct according to claim 151, which is a multiparatopic construct, such as a biparatopic or triparatopic construct, comprising at least one amino acid sequence directed against a first antigenic determinant, epitope, part or domain of HER-2 and at least one amino acid sequence directed against a second antigenic determinant, epitope, part or domain of HER-2 different from the first antigenic determinant, epitope, part or domain.

162.-179. (canceled)

180. Compound or construct according to claim 151, wherein said compound or construct is directed against and/or specifically binds the Herceptin® binding site on HER2 and is directed against and/or specifically binds the Omnitarg binding site on HER2.

181. (canceled)

182. Compound or construct according to claim 151, wherein said compound or construct competes with Herceptin® and Omnitarg for binding to HER2 and/or wherein said compound or construct inhibits and/or blocks binding of Herceptin® and Omnitarg to HER2.

183.-185. (canceled)

186. Biparatopic compound or construct according to claim 161, which can simultaneously bind the Omnitarg binding site on HER2 and to the Herceptin® binding site on HER2.

187.-203. (canceled)

204. Compound or construct according to claim 151, that comprises or that is chosen from the group consisting of SEQ ID NO's: 2336-2344 and 2346-2390 or from the group consisting of amino acid sequences that have more than 80%, preferably more than 90%, more preferably more than 95%, such as 99% or more sequence identity (as defined herein) with at least one of the amino acid sequences of SEQ ID NO's: 2336-2344 and 2346-2390.

205. (canceled)

206. Compound or construct according to claim 151, which has an increased half-life, compared to the corresponding one or more amino acid sequences per se.

207.-234. (canceled)

235. Monovalent construct, comprising or essentially consisting of one amino acid sequence according to claim 1.

236.-239. (canceled)

240. Method for preparing a multivalent construct comprising two or more binding units comprising the use of a monovalent construct according to claim 235, in preparing a multiparatopic construct such as a biparatopic construct, wherein the monovalent construct is used as a binding domain or binding unit in preparing the multivalent construct comprising two or more binding units.

241.-249. (canceled)

250. Method according to claim 240 comprising use of two monovalent constructs, wherein a first monovalent construct is directed against the Omnitarg binding site on HER2 and/or is capable of competing with Omnitarg for binding to HER-2 and wherein the second monovalent construct is directed against the Herceptin® binding site on HER2 and/or is capable of competing with Herceptin® for binding to HER-2.

251. Nucleic acid or nucleotide sequence, that encodes an amino acid sequence according to claim 1.

252. (canceled)

253. Method for preparing a genetic construct that encodes a multiparatopic (such as a biparatopic) construct comprising use of a nucleic acid or nucleotide sequence according to claim 251, that encodes a monovalent construct.

254. (canceled)

255. Host or host cell that expresses, or that under suitable circumstances is capable of expressing, an amino acid sequence according to claim 1.

256. Method for producing an amino acid sequence, said method at least comprising the steps of:
a) expressing, in a suitable host cell or host organism or in another suitable expression system, a nucleic acid or nucleotide sequence according to claim 251 optionally followed by:
b) isolating and/or purifying the amino acid sequence thus obtained.

257. Method for producing an amino acid sequence, said method at least comprising the steps of:
a) cultivating and/or maintaining a host or host cell according to claim 255 under conditions that are such that said host or host cell expresses and/or produces at least one amino acid sequence,
optionally followed by:
b) isolating and/or purifying the amino acid sequence thus obtained.

258. Method for preparing and/or generating a multiparatopic (such as e.g. biparatopic, triparatopic, etc.) construct, said method comprising at least the steps of:
a) providing a nucleic acid sequence according to claim 251, encoding a first HER2 binding amino acid sequence, fused to a set, collection or library of nucleic acid sequences encoding amino acid sequences;
b) screening said set, collection or library of nucleic acid sequences for nucleic acid sequences that encode a second amino acid sequence that can bind to and/or has affinity for an antigenic determinant on HER2 different from the antigenic determinant recognized by the first HER2 binding amino acid sequence;
and
c) isolating the nucleic acid sequence encoding an HER2 binding amino acid sequence fused to the nucleic acid sequence obtained in b), followed by expressing the encoded construct;
wherein the first amino acid sequence used in step a) is such that (i) it can bind to and/or has affinity for the Herceptin® binding site on HER2 and/or (ii) competes with Herceptin® for binding to HER-2.

259.-263. (canceled)

264. Method according to claim 258, wherein in step b), the set, collection or library of nucleic acid sequences is screened for nucleic acid sequences that encode (i) an amino acid sequence that can bind to and/or has affinity for the Omnitarg binding site on HER2 and/or (ii) an amino acid sequence that can compete with Omnitarg or Omnitarg Fab for binding to HER-2.

265.-270. (canceled)

271. Method for screening for suitable and/or optimal linker lengths for linking a first and a second amino acid sequence in a biparatopic construct according to claim 161, wherein said method comprises at least the steps of:
a) providing a set, collection or library of nucleic acid sequences, in which each nucleic acid sequence in said set, collection or library encodes a fusion protein that comprises a first amino acid sequence that can bind to and/or has affinity for a first antigenic determinant, part, domain or epitope on HER2 that is fused via a linker sequence to a second amino acid sequence that has can bind to and/or has affinity for a second antigenic determinant, part, domain or epitope on HER2 (which may be the same or different as the first antigenic determinant, part, domain or epitope on HER2), in which essentially each nucleic acid sequence (or most of these) encodes a fusion protein with a different linker sequence so as to provide a set, collection or library encoding different fusion proteins;
b) screening said set, collection or library of nucleic acid sequences for nucleic acid sequences that encode an amino acid sequence that can bind to and/or has affinity for the first and second antigenic determinant, part, domain or epitope on HER2;
and
c) isolating the nucleic acid sequences that encode an amino acid sequence that can bind to and/or has affinity for the first and second antigenic determinant, part, domain or epitope on HER2, optionally followed by expressing the encoded amino acid sequence;
wherein the second amino acid sequence is an amino acid sequence that can bind to and/or has affinity for the Herceptin® binding site on HER2 and/or that can compete with Herceptin® for binding to HER-2.

272. Method according to claim 271, wherein the first amino acid sequence is an amino acid sequence that can bind to and/or has affinity for the Omnitarg binding site on HER2 and/or that can compete with Omnitarg or Omnitarg Fab for binding to HER-2.

273.-286. (canceled)

287. Method for preparing and/or generating a biparatopic constructs, said method comprising at least the steps of linking two or more monovalent amino acid sequences or monovalent construct according to claim 235.

288. (canceled)

289. Composition, comprising at least one amino acid sequence according to claim 1.

290.-291. (canceled)

292. Method for the prevention and/or treatment of at least one cancer and/or tumor, said method comprising administering, to a subject in need thereof, a pharmaceutically active amount of at least one amino acid sequence according to claim 1.

293.-404. (canceled)

The application's sequence listing, which the Patent Office published only in electronic form, follows.

SEQUENCE LISTING (2446 sequences)

SEQ ID NO: 1 - protein, 102 aa, Artificial
  KERE-class Nanobody
  misc_feature (31)..(35): Xaa is any amino acid
  misc_feature (50)..(54): Xaa is any amino acid
  misc_feature (87)..(91): Xaa is any amino acid
EVQLVESGGGLVQPGGSLRLSCAASGIPFSXXXXXWFRQAPGKQRDSVAXXXXXRFTISRDNAKNTVYLQMNSLKPEDTAVYRCYFXXXXXWGQGTQVTVSS

SEQ ID NO: 2 - protein, 102 aa, Artificial
  KERE-class Nanobody
  misc_feature (31)..(35): Xaa is any amino acid
  misc_feature (50)..(54): Xaa is any amino acid
  misc_feature (87)..(91): Xaa is any amino acid
QVKLEESGGGLVQAGGSLRLSCVGSGRTFSXXXXXWFRLAPGKEREFVAXXXXXRFTISRDTASNRGYLHMNNLTPEDTAVYYCAAXXXXXWGQGTQVTVSS

SEQ ID NO: 3 - protein, 102 aa, Artificial
  KERE-class Nanobody
  misc_feature (31)..(35): Xaa is any amino acid
  misc_feature (50)..(54): Xaa is any amino acid
  misc_feature (87)..(91): Xaa is any amino acid
AVQLVDSGGGLVQAGDSLKLSCALTGGAFTXXXXXWFRQTPGREREFVAXXXXXRFTISRDNAKNMVYLRMNSLIPEDAAVYSCAAXXXXXWGQGTLVTVSS

SEQ ID NO: 4 - protein, 102 aa, Artificial
  KERE-class Nanobody
  misc_feature (31)..(35): Xaa is any amino acid
  misc_feature (50)..(54): Xaa is any amino acid
  misc_feature (87)..(91): Xaa is any amino acid
QVQLVESGGGLVEAGGSLRLSCTASESPFRXXXXXWFRQTSGQEREFVAXXXXXRFTISRDDAKNTVWLHGSTLKPEDTAVYYCAAXXXXXWGQGTQVTVSS

SEQ ID NO: 5 - protein, 102 aa, Artificial
  KERE-class Nanobody
  misc_feature (31)..(35): Xaa is any amino acid
  misc_feature (50)..(54): Xaa is any amino acid
  misc_feature (87)..(91): Xaa is any amino acid
AVQLVESGGGLVQGGGSLRLACAASERIFDXXXXXWYRQGPGNERELVAXXXXXRFTISMDYTKQTVYLHMNSLRPEDTGLYYCKIXXXXXWGQGTQVTVSS

SEQ ID NO: 6 - protein, 102 aa, Artificial
  KERE-class Nanobody
  misc_feature (31)..(35): Xaa is any amino acid
  misc_feature (50)..(54): Xaa is any amino acid
  misc_feature (87)..(91): Xaa is any amino acid
DVKFVESGGGLVQAGGSLRLSCVASGFNFDXXXXXWFRQAPGKEREEVAXXXXXRFTISSEKDKNSVYLQMNSLKPEDTALYICAGXXXXXWGRGTQVTVSS

SEQ ID NO: 7 - protein, 102 aa, Artificial
  KERE-class Nanobody
  misc_feature (31)..(35): Xaa is any amino acid
  misc_feature (50)..(54): Xaa is any amino acid
  misc_feature (87)..(91): Xaa is any amino acid
QVRLAESGGGLVQSGGSLRLSCVASGSTYTXXXXXWYRQYPGKQRALVAXXXXXRFTIARDSTKDTFCLQMNNLKPEDTAVYYCYAXXXXXWGQGTQVTVSS

SEQ ID NO: 8 - protein, 102 aa, Artificial
  KERE-class Nanobody
  misc_feature (31)..(35): Xaa is any amino acid
  misc_feature (50)..(54): Xaa is any amino acid
  misc_feature (87)..(91): Xaa is any amino acid
EVQLVESGGGLVQAGGSLRLSCAASGFTSDXXXXXWFRQAPGKPREGVSXXXXXRFTISTDNAKNTVHLLMNRVNAEDTALYYCAVXXXXXWGRGTRVTVSS

SEQ ID NO: 9 - protein, 102 aa, Artificial
  KERE-class Nanobody
  misc_feature (31)..(35): Xaa is any amino acid
  misc_feature (50)..(54): Xaa is any amino acid
  misc_feature (87)..(91): Xaa is any amino acid
QVQLVESGGGLVQPGGSLRLSCQASGDISTXXXXXWYRQVPGKLREFVAXXXXXRFTISGDNAKRAIYLQMNNLKPDDTAVYYCNRXXXXXWGQGTQVTVSP

SEQ ID NO: 10 - protein, 102 aa, Artificial
  KERE-class Nanobody
  misc_feature (31)..(35): Xaa is any amino acid
  misc_feature (50)..(54): Xaa is any amino acid
  misc_feature (87)..(91): Xaa is any amino acid
QVPVVESGGGLVQAGDSLRLFCAVPSFTSTXXXXXWFRQAPGKEREFVAXXXXXRFTISRNATKNTLTLRMDSLKPEDTAVYYCAAXXXXXWGQGTQVTVSS

SEQ ID NO: 11 - protein, 102 aa, Artificial
  KERE-class Nanobody
  misc_feature (31)..(35): Xaa is any amino acid
  misc_feature (50)..(54): Xaa is any amino acid
  misc_feature (87)..(91): Xaa is any amino acid
EVQLVESGGGLVQAGDSLRLFCTVSGGTASXXXXXWFRQAPGEKREFVAXXXXXRFTIARENAGNMVYLQMNNLKPDDTALYTCAAXXXXXWGRGTQVTVSS

SEQ ID NO: 12 - protein, 102 aa, Artificial
  KERE-class Nanobody
  misc_feature (31)..(35): Xaa is any amino acid
  misc_feature (50)..(54): Xaa is any amino acid
  misc_feature (87)..(91): Xaa is any amino acid
AVQLVESGGDSVQPGDSQTLSCAASGRTNSXXXXXWFRQAPGKERVFLAXXXXXRFTISRDSAKNMMYLQMNNLKPQDTAVYYCAAXXXXXWGQGTQVTVSS

SEQ ID NO: 13 - protein, 102 aa, Artificial
  KERE-class Nanobody
  misc_feature (31)..(35): Xaa is any amino acid
  misc_feature (50)..(54): Xaa is any amino acid
  misc_feature (87)..(91): Xaa is any amino acid
AVQLVESGGGLVQAGGSLRLSCVVSGLTSSXXXXXWFRQTPWQERDFVAXXXXXRFTISRDNYKDTVLLEMNFLKPEDTAIYYCAAXXXXXWGQGTQVTVSS

SEQ ID NO: 14 - protein, 102 aa, Artificial
  KERE-class Nanobody
  misc_feature (31)..(35): Xaa is any amino acid
  misc_feature (50)..(54): Xaa is any amino acid
  misc_feature (87)..(91): Xaa is any amino acid
AVQLVESGGGLVQAGASLRLSCATSTRTLDXXXXXWFRQAPGRDREFVAXXXXXRFTVSRDSAENTVALQMNSLKPEDTAVYYCAAXXXXXWGQGTRVTVSS

SEQ ID NO: 15 - protein, 102 aa, Artificial
  KERE-class Nanobody
  misc_feature (31)..(35): Xaa is any amino acid
  misc_feature (50)..(54): Xaa is any amino acid
  misc_feature (87)..(91): Xaa is any amino acid
QVQLVESGGGLVQPGGSLRLSCTVSRLTAHXXXXXWFRQAPGKEREAVSXXXXXRFTISRDYAGNTAFLQMDSLKPEDTGVYYCATXXXXXWGQGTQVTVSS

SEQ ID NO: 16 - protein, 102 aa, Artificial
  KERE-class Nanobody
  misc_feature (31)..(35): Xaa is any amino acid
  misc_feature (50)..(54): Xaa is any amino acid
  misc_feature (87)..(91): Xaa is any amino acid
EVQLVESGGELVQAGGSLKLSCTASGRNFVXXXXXWFRRAPGKEREFVAXXXXXRFTVSRDNGKNTAYLRMNSLKPEDTADYYCAVXXXXXLGSGTQVTVSS

SEQ ID NO: 17 - protein, 102 aa, Artificial
  GLEW-class Nanobody
  misc_feature (31)..(35): Xaa is any amino acid
  misc_feature (50)..(54): Xaa is any amino acid
  misc_feature (87)..(91): Xaa is any amino acid
AVQLVESGGGLVQPGGSLRLSCAASGFTFSXXXXXWVRQAPGKVLEWVSXXXXXRFTISRDNAKNTLYLQMNSLKPEDTAVYYCVKXXXXXGSQGTQVTVSS

SEQ ID NO: 18 - protein, 102 aa, Artificial
  GLEW-class Nanobody
  misc_feature (31)..(35): Xaa is any amino acid
  misc_feature (50)..(54): Xaa is any amino acid
  misc_feature (87)..(91): Xaa is any amino acid
EVQLVESGGGLVQPGGSLRLSCVCVSSGCTXXXXXWVRQAPGKAEEWVSXXXXXRFKISRDNAKKTLYLQMNSLGPEDTAMYYCQRXXXXXRGQGTQVTVSS

SEQ ID NO: 19 - protein, 102 aa, Artificial
  GLEW-class Nanobody
  misc_feature (31)..(35): Xaa is any amino acid
  misc_feature (50)..(54): Xaa is any amino acid
  misc_feature (87)..(91): Xaa is any amino acid
EVQLVESGGGLALPGGSLTLSCVFSGSTFSXXXXXWVRHTPGKAEEWVSXXXXXRFTISRDNAKNTLYLEMNSLSPEDTAMYYCGRXXXXXRSKGIQVTVSS

SEQ ID NO: 20 - protein, 102 aa, Artificial
  P,R,S 103-class Nanobody
  misc_feature (31)..(35): Xaa is any amino acid
  misc_feature (50)..(54): Xaa is any amino acid
  misc_feature (87)..(91): Xaa is any amino acid
AVQLVESGGGLVQAGGSLRLSCAASGRTFSXXXXXWFRQAPGKEREFVAXXXXXRFTISRDNAKNTVYLQMNSLKPEDTAVYYCAAXXXXXRGQGTQVTVSS

SEQ ID NO: 21 - protein, 102 aa, Artificial
  P,R,S 103-class Nanobody
  misc_feature (31)..(35): Xaa is any amino acid
  misc_feature (50)..(54): Xaa is any amino acid
  misc_feature (87)..(91): Xaa is any amino acid
DVQLVESGGDLVQPGGSLRLSCAASGFSFDXXXXXWLRQTPGKGLEWVGXXXXXRFTISRDNAKNMLYLHLNNLKSEDTAVYYCRRXXXXXLGQGTQVTVSS

SEQ ID NO: 22 - protein, 102 aa, Artificial; identical to SEQ ID NO: 18
  P,R,S 103-class Nanobody
  misc_feature (31)..(35): Xaa is any amino acid
  misc_feature (50)..(54): Xaa is any amino acid
  misc_feature (87)..(91): Xaa is any amino acid

SEQ ID NO: 23 - protein, 30 aa, Artificial
  KERE-class Nanobody FW1 sequence
QVQRVESGGGLVQAGGSLRLSCAASGRTSS

SEQ ID NO: 24 - protein, 30 aa, Artificial
  KERE-class Nanobody FW1 sequence
QVQLVESGGGLVQTGDSLSLSCSASGRTFS

SEQ ID NO: 25 - protein, 30 aa, Artificial
  KERE-class Nanobody FW1 sequence
QVKLEESGGGLVQAGDSLRLSCAATGRAFG

SEQ ID NO: 26 - protein, 30 aa, Artificial
  KERE-class Nanobody FW1 sequence
AVQLVESGGGLVQPGESLGLSCVASGRDFV

SEQ ID NO: 27 - protein, 30 aa, Artificial
  KERE-class Nanobody FW1 sequence
EVQLVESGGGLVQAGGSLRLSCEVLGRTAG

SEQ ID NO: 28 - protein, 30 aa, Artificial
  KERE-class Nanobody FW1 sequence
QVQLVESGGGWVQPGGSLRLSCAASETILS

SEQ ID NO: 29 - protein, 30 aa, Artificial
  KERE-class Nanobody FW1 sequence
QVQLVESGGGTVQPGGSLNLSCVASGNTFN

SEQ ID NO: 30 - protein, 30 aa, Artificial
  KERE-class Nanobody FW1 sequence
EVQLVESGGGLAQPGGSLQLSCSAPGFTLD

SEQ ID NO: 31 - protein, 30 aa, Artificial
  KERE-class Nanobody FW1 sequence
AQELEESGGGLVQAGGSLRLSCAASGRTFN

SEQ ID NO: 32 - protein, 22 aa, Artificial
  KERE-class Nanobody FW1 sequence
VESGGGLVQPGGSLRLSCAASG

SEQ ID NO: 33 - protein, 22 aa, Artificial
  KERE-class Nanobody FW1 sequence
VDSGGGLVQAGDSLKLSCALTG

SEQ ID NO: 34 - protein, 22 aa, Artificial
  KERE-class Nanobody FW1 sequence
VDSGGGLVQAGDSLRLSCAASG

SEQ ID NO: 35 - protein, 22 aa, Artificial
  KERE-class Nanobody FW1 sequence
VDSGGGLVEAGGSLRLSCQVSE

SEQ ID NO: 36 - protein, 22 aa, Artificial
  KERE-class Nanobody FW1 sequence
QDSGGGSVQAGGSLKLSCAASG

SEQ ID NO: 37 - protein, 22 aa, Artificial
  KERE-class Nanobody FW1 sequence
VQSGGRLVQAGDSLRLSCAASE

SEQ ID NO: 38 - protein, 22 aa, Artificial
  KERE-class Nanobody FW1 sequence
VESGGTLVQSGDSLKLSCASST

SEQ ID NO: 39 - protein, 22 aa, Artificial
  KERE-class Nanobody FW1 sequence
MESGGDSVQSGGSLTLSCVASG

SEQ ID NO: 40 - protein, 22 aa, Artificial
  KERE-class Nanobody FW1 sequence
QASGGGLVQAGGSLRLSCSASV

SEQ ID NO: 41 - protein, 14 aa, Artificial
  KERE-class Nanobody FW2 sequence
WFRQAPGKEREFVA

SEQ ID NO: 42 - protein, 14 aa, Artificial
  KERE-class Nanobody FW2 sequence
WFRQTPGREREFVA

SEQ ID NO: 43 - protein, 14 aa, Artificial
  KERE-class Nanobody FW2 sequence
WYRQAPGKQREMVA

SEQ ID NO: 44 - protein, 14 aa, Artificial
  KERE-class Nanobody FW2 sequence
WYRQGPGKQRELVA

SEQ ID NO: 45 - protein, 14 aa, Artificial
  KERE-class Nanobody FW2 sequence
WIRQAPGKEREGVS

SEQ ID NO: 46 - protein, 14 aa, Artificial
  KERE-class Nanobody FW2 sequence
WFREAPGKEREGIS

SEQ ID NO: 47 - protein, 14 aa, Artificial
  KERE-class Nanobody FW2 sequence
WYRQAPGKERDLVA

SEQ ID NO: 48 - protein, 14 aa, Artificial
  KERE-class Nanobody FW2 sequence
WFRQAPGKQREEVS

SEQ ID NO: 49 - protein, 14 aa, Artificial
  KERE-class Nanobody FW2 sequence
WFRQPPGKVREFVG

SEQ ID NO: 50 - protein, 32 aa, Artificial
  KERE-class Nanobody FW3 sequence
RFTISRDNAKNTVYLQMNSLKPEDTAVYRCYF

SEQ ID NO: 51 - protein, 32 aa, Artificial
  KERE-class Nanobody FW3 sequence
RFAISRDNNKNTGYLQMNSLEPEDTAVYYCAA

SEQ ID NO: 52 - protein, 32 aa, Artificial
  KERE-class Nanobody FW3 sequence
RFTVARNNAKNTVNLEMNSLKPEDTAVYYCAA

SEQ ID NO: 53 - protein, 32 aa, Artificial
  KERE-class Nanobody FW3 sequence
RFTISRDIAKNTVDLLMNNLEPEDTAVYYCAA

SEQ ID NO: 54 - protein, 32 aa, Artificial
  KERE-class Nanobody FW3 sequence
RLTISRDNAVDTMYLQMNSLKPEDTAVYYCAA

SEQ ID NO: 55 - protein, 32 aa, Artificial
  KERE-class Nanobody FW3 sequence
RFTISRDNAKNTVYLQMDNVKPEDTAIYYCAA

SEQ ID NO: 56 - protein, 32 aa, Artificial
  KERE-class Nanobody FW3 sequence
RFTISKDSGKNTVYLQMTSLKPEDTAVYYCAT

SEQ ID NO: 57 - protein, 32 aa, Artificial
  KERE-class Nanobody FW3 sequence
RFTISRDSAKNMMYLQMNNLKPQDTAVYYCAA

SEQ ID NO: 58 - protein, 32 aa, Artificial
  KERE-class Nanobody FW3 sequence
RFTISRENDKSTVYLQLNSLKPEDTAVYYCAA

SEQ ID NO: 59 - protein, 32 aa, Artificial
  KERE-class Nanobody FW3 sequence
RFTISRDYAGNTAYLQMNSLKPEDTGVYYCAT

SEQ ID NO: 60 - protein, 11 aa, Artificial
  KERE-class Nanobody FW4 sequence
WGQGTQVTVSS

SEQ ID NO: 61 - protein, 11 aa, Artificial
  KERE-class Nanobody FW4 sequence
WGKGTLVTVSS

SEQ ID NO: 62 - protein, 11 aa, Artificial
  KERE-class Nanobody FW4 sequence
RGQGTRVTVSS

SEQ ID NO: 63 - protein, 11 aa, Artificial
  KERE-class Nanobody FW4 sequence
WGLGTQVTISS

SEQ ID NO: 64 - protein, 30 aa, Artificial
  GLEW-class Nanobody FW1 sequence
QVQLVESGGGLVQPGGSLRLSCAASGFTFS

SEQ ID NO: 65 - protein, 30 aa, Artificial
  GLEW-class Nanobody FW1 sequence
EVHLVESGGGLVRPGGSLRLSCAAFGFIFK

SEQ ID NO: 66 - protein, 30 aa, Artificial
  GLEW-class Nanobody FW1 sequence
QVKLEESGGGLAQPGGSLRLSCVASGFTFS

SEQ ID NO: 67 - protein, 30 aa, Artificial
  GLEW-class Nanobody FW1 sequence
EVQLVESGGGLVQPGGSLRLSCVCVSSGCT

SEQ ID NO: 68 - protein, 30 aa, Artificial
  GLEW-class Nanobody FW1 sequence
EVQLVESGGGLALPGGSLTLSCVFSGSTFS

SEQ ID NO: 69 - protein, 22 aa, Artificial
  GLEW-class Nanobody FW1 sequence
VESGGGLVQPGGSLRLSCAASG

SEQ ID NO: 70 - protein, 22 aa, Artificial
  GLEW-class Nanobody FW1 sequence
EESGGGLAQPGGSLRLSCVASG

SEQ ID NO: 71 - protein, 22 aa, Artificial
  GLEW-class Nanobody FW1 sequence
VESGGGLALPGGSLTLSCVFSG

SEQ ID NO: 72 - protein, 14 aa, Artificial
  GLEW-class Nanobody FW2 sequence
WVRQAPGKVLEWVS

SEQ ID NO: 73 - protein, 14 aa, Artificial
  GLEW-class Nanobody FW2 sequence
WVRRPPGKGLEWVS

SEQ ID NO: 74 - protein, 14 aa, Artificial
  GLEW-class Nanobody FW2 sequence
WVRQAPGMGLEWVS

SEQ ID NO: 75 - protein, 14 aa, Artificial
  GLEW-class Nanobody FW2 sequence
WVRQAPGKEPEWVS

SEQ ID NO: 76 - protein, 14 aa, Artificial
  GLEW-class Nanobody FW2 sequence
WVRQAPGKDQEWVS

SEQ ID NO: 77 - protein, 14 aa, Artificial
  GLEW-class Nanobody FW2 sequence
WVRQAPGKAEEWVS

SEQ ID NO: 78 - protein, 14 aa, Artificial
  GLEW-class Nanobody FW2 sequence
WVRQAPGKGLEWVA

SEQ ID NO: 79 - protein, 14 aa, Artificial
  GLEW-class Nanobody FW2 sequence
WVRQAPGRATEWVS

SEQ ID NO: 80 - protein, 32 aa, Artificial
  GLEW-class Nanobody FW3 sequence
RFTISRDNAKNTLYLQMNSLKPEDTAVYYCVK

SEQ ID NO: 81 - protein, 32 aa, Artificial
  GLEW-class Nanobody FW3 sequence
RFTISRDNARNTLYLQMDSLIPEDTALYYCAR

SEQ ID NO: 82 - protein, 32 aa, Artificial
  GLEW-class Nanobody FW3 sequence
RFTSSRDNAKSTLYLQMNDLKPEDTALYYCAR

SEQ ID NO: 83 - protein, 32 aa, Artificial
  GLEW-class Nanobody FW3 sequence
RFIISRDNAKNTLYLQMNSLGPEDTAMYYCQR

SEQ ID NO: 84 - protein, 32 aa, Artificial
  GLEW-class Nanobody FW3 sequence
RFTASRDNAKNTLYLQMNSLKSEDTARYYCAR

SEQ ID NO: 85 - protein, 32 aa, Artificial
  GLEW-class Nanobody FW3 sequence
RFTISRDNAKNTLYLQMDDLQSEDTAMYYCGR

SEQ ID NO: 86 - protein, 11 aa, Artificial
  GLEW-class Nanobody FW4 sequence
GSQGTQVTVSS

SEQ ID NO: 87 - protein, 11 aa, Artificial
  GLEW-class Nanobody FW4 sequence
LRGGTQVTVSS

SEQ ID NO: 88 - protein, 11 aa, Artificial
  GLEW-class Nanobody FW4 sequence
RGQGTLVTVSS

SEQ ID NO: 89 - protein, 11 aa, Artificial
  GLEW-class Nanobody FW4 sequence
RSRGIQVTVSS

SEQ ID NO: 90 - protein, 11 aa, Artificial
  GLEW-class Nanobody FW4 sequence
WGKGTQVTVSS

SEQ ID NO: 91 - protein, 11 aa, Artificial
  GLEW-class Nanobody FW4 sequence
WGQGTQVTVSS

SEQ ID NO: 92 - protein, 30 aa, Artificial
  P,R,S 103-class Nanobody FW1 sequence
AVQLVESGGGLVQAGGSLRLSCAASGRTFS

SEQ ID NO: 93 - protein, 30 aa, Artificial
  P,R,S 103-class Nanobody FW1 sequence
QVQLQESGGGMVQPGGSLRLSCAASGFDFG

SEQ ID NO: 94 - protein, 30 aa, Artificial; identical to SEQ ID NO: 65
  P,R,S 103-class Nanobody FW1 sequence

SEQ ID NO: 95 - protein, 30 aa, Artificial
  P,R,S 103-class Nanobody FW1 sequence
QVQLAESGGGLVQPGGSLKLSCAASRTIVS

SEQ ID NO: 96 - protein, 30 aa, Artificial
  P,R,S 103-class Nanobody FW1 sequence
QEHLVESGGGLVDIGGSLRLSCAASERIFS

SEQ ID NO: 97 - protein, 30 aa, Artificial; identical to SEQ ID NO: 66
  P,R,S 103-class Nanobody FW1 sequence

SEQ ID NO: 98 - protein, 30 aa, Artificial; identical to SEQ ID NO: 67
  P,R,S 103-class Nanobody FW1 sequence

SEQ ID NO: 99 - protein, 30 aa, Artificial; identical to SEQ ID NO: 68
  P,R,S 103-class Nanobody FW1 sequence

SEQ ID NO: 100 - protein, 22 aa, Artificial
  P,R,S 103-class Nanobody FW1 sequence
VESGGGLVQAGGSLRLSCAASG

SEQ ID NO: 101 - protein, 22 aa, Artificial
  P,R,S 103-class Nanobody FW1 sequence
AESGGGLVQPGGSLKLSCAASR

SEQ ID NO: 102 - protein, 14 aa, Artificial
  P,R,S 103-class Nanobody FW2 sequence
WFRQAPGKEREFVA

SEQ ID NO: 103 - protein, 14 aa, Artificial
  P,R,S 103-class Nanobody FW2 sequence
WVRQAPGKVLEWVS

SEQ ID NO: 104 - protein, 14 aa, Artificial
  P,R,S 103-class Nanobody FW2 sequence
WVRRPPGKGLEWVS

SEQ ID NO: 105 - protein, 14 aa, Artificial
  P,R,S 103-class Nanobody FW2 sequence
WIRQAPGKEREGVS

SEQ ID NO: 106 - protein, 14 aa, Artificial
  P,R,S 103-class Nanobody FW2 sequence
WVRQYPGKEPEWVS

SEQ ID NO: 107 - protein, 14 aa, Artificial
  P,R,S 103-class Nanobody FW2 sequence
WFRQPPGKEHEFVA

SEQ ID NO: 108 - protein, 14 aa, Artificial
  P,R,S 103-class Nanobody FW2 sequence
WYRQAPGKRTELVA

SEQ ID NO: 109 - protein, 14 aa, Artificial
  P,R,S 103-class Nanobody FW2 sequence
WLRQAPGQGLEWVS

SEQ ID NO: 110 - protein, 14 aa, Artificial
  P,R,S 103-class Nanobody FW2 sequence
WLRQTPGKGLEWVG

SEQ ID NO: 111 - protein, 14 aa, Artificial
  P,R,S 103-class Nanobody FW2 sequence
WVRQAPGKAEEFVS

SEQ ID NO: 112 - protein, 32 aa, Artificial
  P,R,S 103-class Nanobody FW3 sequence
RFTISRDNAKNTVYLQMNSLKPEDTAVYYCAA

SEQ ID NO: 113 - protein, 32 aa, Artificial; identical to SEQ ID NO: 81
  P,R,S 103-class Nanobody FW3 sequence

SEQ ID NO: 114 - protein, 32 aa, Artificial
  P,R,S 103-class Nanobody FW3 sequence
RFTISRDNAKNEMYLQMNNLKTEDTGVYWCGA

SEQ ID NO: 115 - protein, 32 aa, Artificial
  P,R,S 103-class Nanobody FW3 sequence
RFTISSDSNRNMIYLQMNNLKPEDTAVYYCAA

SEQ ID NO: 116 - protein, 32 aa, Artificial
  P,R,S 103-class Nanobody FW3 sequence
RFTISRDNAKNMLYLHLNNLKSEDTAVYYCRR

SEQ ID NO: 117 - protein, 32 aa, Artificial
  P,R,S 103-class Nanobody FW3 sequence
RFTISRDNAKKTVYLRLNSLNPEDTAVYSCNL

SEQ ID NO: 118 - protein, 32 aa, Artificial
  P,R,S 103-class Nanobody FW3 sequence
RFKISRDNAKKTLYLQMNSLGPEDTAMYYCQR

SEQ ID NO: 119 - protein, 32 aa, Artificial
  P,R,S 103-class Nanobody FW3 sequence
RFTVSRDNGKNTAYLRMNSLKPEDTADYYCAV

SEQ ID NO: 120 - protein, 11 aa, Artificial
  P,R,S 103-class Nanobody FW4 sequence
RGQGTQVTVSS

SEQ ID NO: 121 - protein, 11 aa, Artificial
  P,R,S 103-class Nanobody FW4 sequence
LRGGTQVTVSS

SEQ ID NO: 122 - protein, 11 aa, Artificial
  P,R,S 103-class Nanobody FW4 sequence
GNKGTLVTVSS

SEQ ID NO: 123 - protein, 11 aa, Artificial
  P,R,S 103-class Nanobody FW4 sequence
SSPGTQVTVSS

SEQ ID NO: 124 - protein, 11 aa, Artificial
  P,R,S 103-class Nanobody FW4 sequence
SSQGTLVTVSS

SEQ ID NO: 125 - protein, 11 aa, Artificial
  P,R,S 103-class Nanobody FW4 sequence
RSRGIQVTVSS

SEQ ID NO: 126 - protein, 30 aa, Artificial
  FR1 sequence
EVQLVESGGGLVHPGGSLRLSCVGSGFSLD

SEQ ID NO: 127 - protein, 30 aa, Artificial
  FR1 sequence
EVQLVESGGGLVQPGGSLRLSCVGSGFSLD

SEQ ID NO: 128 - protein, 30 aa, Artificial
  FR1 sequence
EVQLVESGGGLVQPGGSLRLSCVASGFSLD

SEQ ID NO: 129 - protein, 30 aa, Artificial; identical to SEQ ID NO: 128
  FR1 sequence

SEQ ID NO: 130 - protein, 30 aa, Artificial; identical to SEQ ID NO: 128
  FR1 sequence

SEQ ID NO: 131 - protein, 30 aa, Artificial; identical to SEQ ID NO: 128
  FR1 sequence

SEQ ID NO: 132 - protein, 30 aa, Artificial; identical to SEQ ID NO: 128
  FR1 sequence

SEQ ID NO: 133 - protein, 30 aa, Artificial
  FR1 sequence
EVQLVESGGGLVQAGGSLRLSCVASKMTFM

SEQ ID NO: 134 - protein, 30 aa, Artificial
  FR1 sequence
EVQLMESGGGLVQPGGSLRLSCVASGFSLD

SEQ ID NO: 135 - protein, 30 aa, Artificial; identical to SEQ ID NO: 128
  FR1 sequence

SEQ ID NO: 136 - protein, 30 aa, Artificial; identical to SEQ ID NO: 128
  FR1 sequence

SEQ ID NO: 137 - protein, 30 aa, Artificial; identical to SEQ ID NO: 128
  FR1 sequence

SEQ ID NO: 138 - protein, 30 aa, Artificial; identical to SEQ ID NO: 128
  FR1 sequence

SEQ ID NO: 139 - protein, 30 aa, Artificial; identical to SEQ ID NO: 128
  FR1 sequence

SEQ ID NO: 140 - protein, 30 aa, Artificial; identical to SEQ ID NO: 128
  FR1 sequence

SEQ ID NO: 141 - protein, 30 aa, Artificial; identical to SEQ ID NO: 128
  FR1 sequence

SEQ ID NO: 142 - protein, 30 aa, Artificial; identical to SEQ ID NO: 128
  FR1 sequence

SEQ ID NO: 143 - protein, 30 aa, Artificial; identical to SEQ ID NO: 128
  FR1 sequence

SEQ ID NO: 144 - protein, 30 aa, Artificial; identical to SEQ ID NO: 128
  FR1 sequence

SEQ ID NO: 145 - protein, 30 aa, Artificial
  FR1 sequence
EVQLVESGGGLVQPGGSLKLSCVASGFSLD

SEQ ID NO: 146 - protein, 30 aa, Artificial; identical to SEQ ID NO: 128
  FR1 sequence

SEQ ID NO: 147 - protein, 30 aa, Artificial; identical to SEQ ID NO: 128
  FR1 sequence

SEQ ID NO: 148 - protein, 30 aa, Artificial; identical to SEQ ID NO: 128
  FR1 sequence

SEQ ID NO: 149 - protein, 30 aa, Artificial; identical to SEQ ID NO: 128
  FR1 sequence

SEQ ID NO: 150 - protein, 30 aa, Artificial; identical to SEQ ID NO: 128
  FR1 sequence

SEQ ID NO: 151 - protein, 30 aa, Artificial; identical to SEQ ID NO: 128
  FR1 sequence

SEQ ID NO: 152 - protein, 30 aa, Artificial; identical to SEQ ID NO: 128
  FR1 sequence

SEQ ID NO: 153 - protein, 30 aa, Artificial; identical to SEQ ID NO: 145
  FR1 sequence

SEQ ID NO: 154 - protein, 30 aa, Artificial
  FR1 sequence
EVQLVESGGGLVQPGGSLRLSCVASGFSLI

SEQ ID NO: 155 - protein, 30 aa, Artificial; identical to SEQ ID NO: 128
  FR1 sequence

SEQ ID NO: 156 - protein, 30 aa, Artificial; identical to SEQ ID NO: 127
  FR1 sequence

SEQ ID NO: 157 - protein, 30 aa, Artificial
  FR1 sequence
EVQLVESGGGLVQPGGSLRLSCAASGFIFD

SEQ ID NO: 158 - protein, 30 aa, Artificial; identical to SEQ ID NO: 157
  FR1 sequence

SEQ ID NO: 159 - protein, 30 aa, Artificial
  FR1 sequence
EVQLVESGGGLVQPGGSLKLSCAASGFIFD

SEQ ID NO: 160 - protein, 30 aa, Artificial
  FR1 sequence
EVQLVESGGGLVQPGGSLTLSCAGSGFIFD

SEQ ID NO: 161 - protein, 30 aa, Artificial
  FR1 sequence
EVQLVESGGSLVQPGGSLRLSCAASGFTFD

SEQ ID NO: 162 - protein, 30 aa, Artificial
  FR1 sequence
EVQLVESGGSLVQPGESLRLSCAASGFTFD

SEQ ID NO: 163 - protein, 30 aa, Artificial
  FR1 sequence
EVQLVESGGSLVPPGGSLRLSCAASGFTFD

SEQ ID NO: 164 - protein, 30 aa, Artificial; identical to SEQ ID NO: 161
  FR1 sequence

SEQ ID NO: 165 - protein, 30 aa, Artificial; identical to SEQ ID NO: 161
  FR1 sequence

SEQ ID NO: 166 - protein, 30 aa, Artificial
  FR1 sequence
EVQLVESGGSLVPPGGSLRLSCAVSGFTFD

SEQ ID NO: 167 - protein, 30 aa, Artificial; identical to SEQ ID NO: 161
  FR1 sequence

SEQ ID NO: 168 - protein, 30 aa, Artificial; identical to SEQ ID NO: 161
  FR1 sequence

SEQ ID NO: 169 - protein, 30 aa, Artificial; identical to SEQ ID NO: 161
  FR1 sequence

SEQ ID NO: 170 - protein, 30 aa, Artificial; identical to SEQ ID NO: 163
  FR1 sequence

SEQ ID NO: 171 - protein, 30 aa, Artificial; identical to SEQ ID NO: 161
  FR1 sequence

SEQ ID NO: 172 - protein, 30 aa, Artificial; identical to SEQ ID NO: 161
  FR1 sequence

SEQ ID NO: 173 - protein, 30 aa, Artificial; identical to SEQ ID NO: 163
  FR1 sequence

SEQ ID NO: 174 - protein, 30 aa, Artificial
  FR1 sequence
KVQLVESGGSLVPPGGSLRLSCAASGFTFD

SEQ ID NO: 175 - protein, 30 aa, Artificial; identical to SEQ ID NO: 163
  FR1 sequence

SEQ ID NO: 176 - protein, 30 aa, Artificial; identical to SEQ ID NO: 163
  FR1 sequence

SEQ ID NO: 177 - protein, 30 aa, Artificial; identical to SEQ ID NO: 161
  FR1 sequence

SEQ ID NO: 178 - protein, 30 aa, Artificial
  FR1 sequence
EVQLVESGGGLVQPGGSLRLSCATSGFTFD

SEQ ID NO: 179 - protein, 30 aa, Artificial
  FR1 sequence
EVQLVESGGSLVQPGGSLRLSCATSGFTFD

SEQ ID NO: 180 - protein, 30 aa, Artificial; identical to SEQ ID NO: 161
  FR1 sequence

SEQ ID NO: 181 - protein, 30 aa, Artificial; identical to SEQ ID NO: 161
  FR1 sequence

SEQ ID NO: 182 - protein, 30 aa, Artificial; identical to SEQ ID NO: 161
  FR1 sequence

SEQ ID NO: 183 - protein, 30 aa, Artificial; identical to SEQ ID NO: 161
  FR1 sequence

SEQ ID NO: 184 - protein, 30 aa, Artificial; identical to SEQ ID NO: 163
  FR1 sequence

SEQ ID NO: 185 - protein, 30 aa, Artificial; identical to SEQ ID NO: 161
  FR1 sequence

SEQ ID NO: 186 - protein, 30 aa, Artificial; identical to SEQ ID NO: 161
  FR1 sequence

SEQ ID NO: 187 - protein, 30 aa, Artificial
  FR1 sequence
EVQLVESGGGLVQAGGSLRLSCAASGITFS

SEQ ID NO: 188 - protein, 30 aa, Artificial
  FR1 sequence
EVQLVESGGGFVQTGGSPRLSCAASGRSFS

SEQ ID NO: 189 - protein, 30 aa, Artificial
  FR1 sequence
KVQLVESGGGLVQPGGSLRLSCAASGSIFG

SEQ ID NO: 190 - protein, 30 aa, Artificial
  FR1 sequence
EVQLVESGGGLVQAGGSLRLSCAASGSTFS

SEQ ID NO: 191 - protein, 30 aa, Artificial
  FR1 sequence
EVQLVESGGGLVQAGGSLRLSCAVNSRTFS

SEQ ID NO: 192 - protein, 30 aa, Artificial
  FR1 sequence
EVQLVESGGGLVQAGGSLRLSCAVSSRAFS

SEQ ID NO: 193 - protein, 30 aa, Artificial; identical to SEQ ID NO: 191
  FR1 sequence

SEQ ID NO: 194 - protein, 30 aa, Artificial; identical to SEQ ID NO: 192
  FR1 sequence

SEQ ID NO: 195 - protein, 30 aa, Artificial
  FR1 sequence
EVQLVESGGGSVQAGGSLRLSCVASEGTFS

SEQ ID NO: 196 - protein, 30 aa, Artificial
  FR1 sequence
EVQLVESGGGSVQAGSSLTLSCVASEGTFS

SEQ ID NO: 197 - protein, 30 aa, Artificial
  FR1 sequence
EVQLVESGGGLVQPGGSLTLSCVASEGTFS

SEQ ID NO: 198 - protein, 30 aa, Artificial
  FR1 sequence
EVQLVESGGGSVQAGGSLRLSCAASGSTFS

SEQ ID NO: 199 - protein, 30 aa, Artificial
  FR1 sequence
EVQLVKSGGGLVQAGGSLRLSCAASERTFS

SEQ ID NO: 200 - protein, 30 aa, Artificial
  FR1 sequence
EVQLVESGGGLVQAGGSLRLSCAASERTFS

SEQ ID NO: 201 - protein, 30 aa, Artificial
  FR1 sequence
EVQLVESGGGSVQAGGSLRLSCAASERTFS

SEQ ID NO: 202 - protein, 30 aa, Artificial
  FR1 sequence
EVQLVESGGGLVQAGGSLRLSCAANGLTFR

SEQ ID NO: 203 - protein, 30 aa, Artificial
  FR1 sequence
KVQLVESGGGLVQAGGSLRLSCAASGRTFT

SEQ ID NO: 204 - protein, 30 aa, Artificial
  FR1 sequence
EVQLVESGGGLVQAGGSLRLSCAASGFTFD

SEQ ID NO: 205 - protein, 30 aa, Artificial
  FR1 sequence
EVQLVESGGGLVQPGGSLRLSCAASGFAFS

SEQ ID NO: 206 - protein, 30 aa, Artificial
  FR1 sequence
EVQLVESGGGLVQAGGSLRLSCTASGRTSS

SEQ ID NO: 207 - protein, 30 aa, Artificial
  FR1 sequence
EVQLVESGGGLVQAGGSLRLSCVTSRRPAS

SEQ ID NO: 208 - protein, 30 aa, Artificial
  FR1 sequence
EVQLVESGGGLVQPGGSLRLSCAASRIPFS

SEQ ID NO: 209 - protein, 30 aa, Artificial; identical to SEQ ID NO: 207
  FR1 sequence

SEQ ID NO: 210 - protein, 30 aa, Artificial
  FR1 sequence
EVQLVESGGGLVQAGGSLRLSCVASRIPFS

SEQ ID NO: 211 - protein, 30 aa, Artificial; identical to SEQ ID NO: 207
  FR1 sequence

SEQ ID NO: 212 - protein, 30 aa, Artificial
  FR1 sequence
EVQLVESGGGLVQAGGSLNLSCVASGIPFS

SEQ ID NO: 213 - protein, 30 aa, Artificial; identical to SEQ ID NO: 212
  FR1 sequence

SEQ ID NO: 214 - protein, 30 aa, Artificial; identical to SEQ ID NO: 212
  FR1 sequence

SEQ ID NO: 215 - protein, 30 aa, Artificial
  FR1 sequence
EVQLVESGGGLVQPGGSLRLSCVASRIPAS

SEQ ID NO: 216 - protein, 30 aa, Artificial
  FR1 sequence
EVQLVESGGGLVQAGGSLRLSCVASRIPAS

SEQ ID NO: 217 - protein, 30 aa, Artificial; identical to SEQ ID NO: 215
  FR1 sequence

SEQ ID NO: 218 - protein, 30 aa, Artificial
  FR1 sequence
EVQLVESGGGLVQPGGSLKLSCVASTIPAS

SEQ ID NO: 219 - protein, 30 aa, Artificial
  FR1 sequence
EVQLVESGGGLVQAGGSLRLSCVASGIPFR

SEQ ID NO: 220 - protein, 30 aa, Artificial
  FR1 sequence
EVQLVESGGGLVQAGESLRLSCATSGITFK

SEQ ID NO: 221 - protein, 30 aa, Artificial
  FR1 sequence
EVQLMESGGGLVQAGGSLRLSCAANGLTFR

SEQ ID NO: 222 - protein, 30 aa, Artificial; identical to SEQ ID NO: 202
  FR1 sequence

SEQ ID NO: 223 - protein, 30 aa, Artificial
  FR1 sequence
EVQLVESGGGLVQPGGSLRLSCAASGLGIA

SEQ ID NO: 224 - protein, 30 aa, Artificial; identical to SEQ ID NO: 223
  FR1 sequence

SEQ ID NO: 225 - protein, 30 aa, Artificial
  FR1 sequence
EVQLVESGGGLVQAGGSLRLSCVASGIAQS

SEQ ID NO: 226 - protein, 30 aa, Artificial
  FR1 sequence
EVQLVESGGGLVQAGGSLRLSCAASGIAFR

SEQ ID NO: 227 - protein, 30 aa, Artificial
  FR1 sequence
EVQLVESGGGLVQAGGSLRLSCVASGIPSI

SEQ ID NO: 228 - protein, 30 aa, Artificial
  FR1 sequence
EVQLMESGGGLVQPGGSLRLSCAASGLGIA

SEQ ID NO: 229 - protein, 30 aa, Artificial; identical to SEQ ID NO: 226
  FR1 sequence

SEQ ID NO: 230 - protein, 30 aa, Artificial
  FR1 sequence
EVQLVESGGGLVQAGGSLRLSCVVSGIPSS

SEQ ID NO: 231 - protein, 30 aa, Artificial
  FR1 sequence
EVQLVESGGGSVQAGGSLRLSCVVSGIPSS

SEQ ID NO: 232 - protein, 30 aa, Artificial; identical to SEQ ID NO: 227
  FR1 sequence

SEQ ID NO: 233 - protein, 30 aa, Artificial
  FR1 sequence
EVQLVESGGGLVQPGGSLRLSCAASGIIGT

SEQ ID NO: 234 - protein, 30 aa, Artificial
  FR1 sequence
EVQLVESGGGLVQAGGSLRLPCAASGIAFR

SEQ ID NO: 235 - protein, 30 aa, Artificial; identical to SEQ ID NO: 226
  FR1 sequence

SEQ ID NO: 236 - protein, 30 aa, Artificial; identical to SEQ ID NO: 230
  FR1 sequence

SEQ ID NO: 237 - protein, 30 aa, Artificial
  FR1 sequence
EVQLVESGGGLVQAGGSLRLSCVVSGIPST

SEQ ID NO: 238 - protein, 30 aa, Artificial; identical to SEQ ID NO: 230
  FR1 sequence

SEQ ID NO: 239 - protein, 30 aa, Artificial
  FR1 sequence
EVQLVESGGGLVQAGGSLRLSCAASGRTFS

SEQ ID NO: 240 - protein, 30 aa, Artificial
  FR1 sequence
EVQLVESGGGLVQAGGSLRLSCAASGRAFK

SEQ ID NO: 241 - protein, 30 aa, Artificial
  FR1 sequence
EVQLVESGGGLVQTGGSLRLSCAASGSTFR

SEQ ID NO: 242 - protein, 30 aa, Artificial
  FR1 sequence
EVQLVESGGGLVQAGGSLKLSCVNSGIPST

SEQ ID NO: 243 - protein, 30 aa, Artificial
  FR1 sequence
EVQLVESGGGLVQPGGSLRLSCAASSVITL

SEQ ID NO: 244 - protein, 30 aa, Artificial
  FR1 sequence
EVQLVESGGGLVQAGGSLTLSCAASGSTSS

SEQ ID NO: 245 - protein, 30 aa, Artificial
  FR1 sequence
EVQLVESGGGLAQAGGSLSLSCAASGRFFS

SEQ ID NO: 246 - protein, 30 aa, Artificial
  FR1 sequence
EVQLVESGGGLVQAGGSLSLSCAASGRFFS

SEQ ID NO: 247 - protein, 30 aa, Artificial; identical to SEQ ID NO: 246
  FR1 sequence

SEQ ID NO: 248 - protein, 30 aa, Artificial
  FR1 sequence
EVQLVESGGGLVQAGGSLSLSCVASGRFFS

SEQ ID NO: 249 - protein, 30 aa, Artificial
  FR1 sequence
EVQLVESGGGLVQAGGSLSLSCSASGRFFS

SEQ ID NO: 250 - protein, 30 aa, Artificial
  FR1 sequence
EVQLVESGGGLVQAGGSLTLSCTASETTVR

SEQ ID NO: 251 - protein, 30 aa, Artificial
  FR1 sequence
EVQLVESGGGLVQAGGSLTLSCAPSESTVS

SEQ ID NO: 252 - protein, 30 aa, Artificial
  FR1 sequence
EVQLVESGGGLVQAGGSLRLSCAASGIISS

SEQ ID NO: 253 - protein, 30 aa, Artificial
  FR1 sequence
EVQLVESGGGLVQAGGSLRLSCVVSGVFGP

SEQ ID NO: 254 - protein, 30 aa, Artificial
  FR1 sequence
EVQLVESGGGLVQPGGSLRLSCAASGIGIA

SEQ ID NO: 255 - protein, 30 aa, Artificial
  FR1 sequence
EVQLVESGGGLVQPGGSLRLSCAASGIIGS

SEQ ID NO: 256 - protein, 30 aa, Artificial; identical to SEQ ID NO: 252
  FR1 sequence

SEQ ID NO: 257 - protein, 30 aa, Artificial; identical to SEQ ID NO: 223
  FR1 sequence

SEQ ID NO: 258 - protein, 30 aa, Artificial
  FR1 sequence
EVQLVESGGGLVQPGGSLRLSCAGSGFTFS

SEQ ID NO: 259 - protein, 30 aa, Artificial; identical to SEQ ID NO: 133
  FR1 sequence

SEQ ID NO: 260 - protein, 30 aa, Artificial; identical to SEQ ID NO: 133
  FR1 sequence

SEQ ID NO: 261 - protein, 30 aa, Artificial
  FR1 sequence
EVQLVESGGGLVQAGGSLRLSCVASKITFR

SEQ ID NO: 262 - protein, 30 aa, Artificial
  FR1 sequence
EVQLVESGGGLVQAGGSLKLSCVASGITFF

SEQ ID NO: 263 - protein, 30 aa, Artificial
  FR1 sequence
EVQLVESGGGLVQAGGSLRLSCAASGITFR

SEQ ID NO: 264 - protein, 30 aa, Artificial
  FR1 sequence
EVQLVESGGGLVQAGGSLRLSCAASASIFG

SEQ ID NO: 265 - protein, 30 aa, Artificial
  FR1 sequence
EVQLVESGGGLVQAGGSLRLSCAASGNIFS

SEQ ID NO: 266 - protein, 30 aa, Artificial
  FR1 sequence
EVQLVESGGGLVQAGDSLRLSCAASGRALD

SEQ ID NO: 267 - protein, 30 aa, Artificial
  FR1 sequence
EVQLVESGGGLVQPGGSLRLSCAASGFTFD

SEQ ID NO: 268 - protein, 30 aa, Artificial
  FR1 sequence
EVQLVESGGGLVQPGGSLKLSCAASGFTFS

SEQ ID NO: 269 - protein, 30 aa, Artificial; identical to SEQ ID NO: 190
  FR1 sequence

SEQ ID NO: 270 - protein, 30 aa, Artificial; identical to SEQ ID NO: 190
  FR1 sequence

SEQ ID NO: 271 - protein, 30 aa, Artificial
  FR1 sequence
EVQLVESGGGLVQAGGSLSLSCAASATLHR

SEQ ID NO: 272 - protein, 30 aa, Artificial
  FR1 sequence
EVQLVESGGGLVQPGGSLRLSCAASGFTFS

SEQ ID NO: 273 - protein, 30 aa, Artificial; identical to SEQ ID NO: 272
  FR1 sequence

SEQ ID NO: 274 - protein, 30 aa, Artificial
  FR1 sequence
EVQLVESGGGLVQPGGSLRLSCAASGFTLD

SEQ ID NO: 275 - protein, 30 aa, Artificial; identical to SEQ ID NO: 157
  FR1 sequence

SEQ ID NO: 276 - protein, 30 aa, Artificial; identical to SEQ ID NO: 250
  FR1 sequence

SEQ ID NO: 277 - protein, 30 aa, Artificial; identical to SEQ ID NO: 250
  FR1 sequence

SEQ ID NO: 278 - protein, 30 aa, Artificial; identical to SEQ ID NO: 250
  FR1 sequence

SEQ ID NO: 279 - protein, 30 aa, Artificial; identical to SEQ ID NO: 250
  FR1 sequence

SEQ ID NO: 280 - protein, 30 aa, Artificial
  FR1 sequence
EVQLVESGGGLVQPGGSLRLSCAASGRIFY

SEQ ID NO: 281 - protein, 30 aa, Artificial; identical to SEQ ID NO: 267
  FR1 sequence

SEQ ID NO: 282 - protein, 30 aa, Artificial
  FR1 sequence
EVQLVESGGGLVQAGGSLRLSCAASGRTFN

SEQ ID NO: 283 - protein, 30 aa, Artificial; identical to SEQ ID NO: 239
  FR1 sequence

SEQ ID NO: 284 - protein, 30 aa, Artificial
  FR1 sequence
KVQLVESGGGLVQAGGSLRLSCAASGRTFS

SEQ ID NO: 285 - protein, 30 aa, Artificial; identical to SEQ ID NO: 239
  FR1 sequence

SEQ ID NO: 286 - protein, 30 aa, Artificial; identical to SEQ ID NO: 239
  FR1 sequence

SEQ ID NO: 287 - protein, 30 aa, Artificial
  FR1 sequence
EVQLVESGGGLVQAGGSLRLSCVASGRTFS

SEQ ID NO: 288 - protein, 30 aa, Artificial; identical to SEQ ID NO: 239
  FR1 sequence

SEQ ID NO: 289 - protein, 30 aa, Artificial; identical to SEQ ID NO: 239
  FR1 sequence

SEQ ID NO: 290 - protein, 30 aa, Artificial
  FR1 sequence
EVQLVESGGGLVQAGGSLRLSCEASGLTIS

SEQ ID NO: 291 - protein, 30 aa, Artificial
  FR1 sequence
EVQLVESGGGLVQPGGSLRLSCAASGSAFS

SEQ ID NO: 292 - protein, 30 aa, Artificial
  FR1 sequence
EVQLVESGGGLVQAGGSLGLSCAAAGRTFS

SEQ ID NO: 293 - protein, 30 aa, Artificial
  FR1 sequence
EVQLVESGGGLVQAGGSLRLSCAASGRAFS

SEQ ID NO: 294 - protein, 30 aa, Artificial
  FR1 sequence
EVQLVESGGGLVQAGGSLRLSCATSGRTFS

SEQ ID NO: 295 - protein, 30 aa, Artificial
  FR1 sequence
EVQLVESGGGLVQPGGSLRLSCAASGNIDG

SEQ ID NO: 296 - protein, 30 aa, Artificial
  FR1 sequence
EVQLVESGGGLVQTGGSLRLSCAASGPTFS

SEQ ID NO: 297 - protein, 30 aa, Artificial
  FR1 sequence
EVQLVESGGGLVQAGDSLRLSCAASGFTFS

SEQ ID NO: 298 - protein, 30 aa, Artificial
  FR1 sequence
EVQLVESGGGLVQAGSSLRLSCALSGRTFS

SEQ ID NO: 299 - protein, 30 aa, Artificial
  FR1 sequence
EVQLVESGGGLVQAGGSLRLSCIASERTFS

SEQ ID NO: 300 - protein, 30 aa, Artificial
  FR1 sequence
EVQLVESGGGLVQPGDSLRLSCSASEGTLS

SEQ ID NO: 301 - protein, 30 aa, Artificial
  FR1 sequence
EVQLVESGGGLVQPGGSLTLSCVGSGRRFS

SEQ ID NO: 302 - protein, 30 aa, Artificial
  FR1 sequence
EVQLVESGGGLVQPGGSLPLSCAASGSIFR

SEQ ID NO: 303 - protein, 30 aa, Artificial
  FR1 sequence
EVQLVESGGGLAQAGGSLRLSCAVFGRSRY

SEQ ID NO: 304 - protein, 30 aa, Artificial
  FR1 sequence
EVQLVESGGGQVQAGGSLRLSCTESGRAFN

SEQ ID NO: 305 - protein, 30 aa, Artificial
  FR1 sequence
EVQLVESGGGLVQAGGSLGLSCAASGRTFS

SEQ ID NO: 306 - protein, 30 aa, Artificial
  FR1 sequence
EVQLVESGGGLVQAGDSLRLSCVASGGTFG

SEQ ID NO: 307 - protein, 30 aa, Artificial
  FR1 sequence
EVQLVESGGGLAQAGDSLRLSCVDSGSSFS

SEQ ID NO: 308 - protein, 30 aa, Artificial
  FR1 sequence
EVQLVESGGGLVQAGGSLRLSCAVSGGTFE

SEQ ID NO: 309 - protein, 30 aa, Artificial; identical to SEQ ID NO: 239
  FR1 sequence

SEQ ID NO: 310 - protein, 30 aa, Artificial
  FR1 sequence
EVQLVESGGGLVQAGDSLRLSCVASGDSFN

SEQ ID NO: 311 - protein, 30 aa, Artificial
  FR1 sequence
EVQLVESGGGLVQAGGSLRLSCVVSEGTFS

SEQ ID NO: 312 - protein, 30 aa, Artificial
  FR1 sequence
EAQLVESGGGLVQAGGSLRLSCTASGRTYS

SEQ ID NO: 313 - protein, 30 aa, Artificial; identical to SEQ ID NO: 293
  FR1 sequence

SEQ ID NO: 314 - protein, 30 aa, Artificial
  FR1 sequence
EVQLVESGGGLVQAGGSLRLSCAASGGTFS

SEQ ID NO: 315 - protein, 30 aa, Artificial
  FR1 sequence
EVQLVESGGGLVQAGGSLRLSCAASGGAFG

SEQ ID NO: 316 - protein, 30 aa, Artificial
  FR1 sequence
EVQLVESGGGLVQAGGSLRLSCAASGGTFG

SEQ ID NO: 317 - protein, 30 aa, Artificial
  FR1 sequence
EVQLVESGGGLVQAGGSLELSCAASGGAFG

SEQ ID NO: 318 - protein, 30 aa, Artificial; identical to SEQ ID NO: 316
  FR1 sequence

SEQ ID NO: 319 - protein, 30 aa, Artificial; identical to SEQ ID NO: 316
  FR1 sequence

SEQ ID NO: 320 - protein, 30 aa, Artificial
  FR1 sequence
EVQLVESGGGLVQAGGSLKLSCAVSGRTIV

SEQ ID NO: 321 - protein, 30 aa, Artificial; identical to SEQ ID NO: 272
  FR1 sequence

SEQ ID NO: 322 - protein, 30 aa, Artificial; identical to SEQ ID NO: 314
  FR1 sequence

SEQ ID NO: 323 - protein, 30 aa, Artificial
  FR1 sequence
EVQLVESGGGLVQAGGSLRLSCAASRHTFS

SEQ ID NO: 324 - protein, 30 aa, Artificial
  FR1 sequence
EVQLVESGGGLVQTGGSLRLSCAASGRAFS

SEQ ID NO: 325 - protein, 30 aa, Artificial
  FR1 sequence
EVQLVESGGGLVQAGGSLRLSCAASGRSFN

SEQ ID NO: 326 - protein, 30 aa, Artificial
  FR1 sequence
EVQLVESGGGLVRAGTSLRLSCADSARTFS

SEQ ID NO: 327 - protein, 30 aa, Artificial
  FR1 sequence
EVQLVESGGGLVQPGGSLRLSCTVFGRTFS

SEQ ID NO: 328 - protein, 30 aa, Artificial
  FR1 sequence
EVQLVESGGGLVQAGGSLGLSCAASGRTVS

SEQ ID NO: 329 - protein, 30 aa, Artificial
  FR1 sequence
EVQLVESGGGLVQAGGSLRLSCVASGRTLS

SEQ ID NO: 330 - protein, 30 aa, Artificial; identical to SEQ ID NO: 329
  FR1 sequence

SEQ ID NO: 331 - protein, 30 aa, Artificial; identical to SEQ ID NO: 239
  FR1 sequence

SEQ ID NO: 332 - protein, 30 aa, Artificial; identical to SEQ ID NO: 329
  FR1 sequence

SEQ ID NO: 333 - protein, 30 aa, Artificial
  FR1 sequence
EVQLVESGGGLVQAGGSLRLSCVRSGGYFG

SEQ ID NO: 334 - protein, 30 aa, Artificial
  FR1 sequence
EVQLVESGGGLVQPGGSLRLSCAASGSIFS

SEQ ID NO: 335 - protein, 30 aa, Artificial
  FR1 sequence
EMQLVESGGGLVQAGGSLRLSCATSERTFS

SEQ ID NO: 336 - protein, 30 aa, Artificial
  FR1 sequence
EVQLVESGGGLVQPGGSLRLSCAASRSIFS

SEQ ID NO: 337 - protein, 30 aa, Artificial; identical to SEQ ID NO: 314
  FR1 sequence

SEQ ID NO: 338 - protein, 30 aa, Artificial
  FR1 sequence
EVQLVESGGGLVQAGGSLRLSCAVSGFLFD

SEQ ID NO: 339 - protein, 30 aa, Artificial
  FR1 sequence
EVQLVESGGGLVQPGGSLRLSCAASRSIRS

SEQ ID NO: 340 - protein, 30 aa, Artificial
  FR1 sequence
EVQLVESGGALVQPGGSLRLSCAASGSIRS

SEQ ID NO: 341 - protein, 30 aa, Artificial
  FR1 sequence
EVQLVESGGALVQPGGSLRLSCAASDSIRS

SEQ ID NO: 342 - protein, 30 aa, Artificial
  FR1 sequence
EVQLVESGGGLVQPGGSLRLSCAASGSSAS

SEQ ID NO: 343 - protein, 30 aa, Artificial
  FR1 sequence
EVQLVESGGGLVQPGGSLRLSCAASRNIFD

SEQ ID NO: 344 - protein, 30 aa, Artificial; identical to SEQ ID NO: 314
  FR1 sequence

SEQ ID NO: 345 - protein, 30 aa, Artificial
  FR1 sequence
EVQLVESGGGLVQAGGSLSLSCAASGGTFN

SEQ ID NO: 346 - protein, 30 aa, Artificial
  FR1 sequence
EVQLVESGGGLVQAGGSLRLSCAISGRTLS

SEQ ID NO: 347 - protein, 30 aa, Artificial
  FR1 sequence
EVQLVESGGGLVQAGGSLRLSCAVSGRTFN

SEQ ID NO: 348 - protein, 30 aa, Artificial
  FR1 sequence
EVQLVESGGGLVRPGGSLRLSCATSGSDIG

SEQ ID NO: 349 - protein, 30 aa, Artificial
  FR1 sequence
EVQLVESGGGLVQAGGSLRLSCAASGRALI

SEQ ID NO: 350 - protein, 30 aa, Artificial
  FR1 sequence
EVQLVESGGGVVQAGGSLRLSCAPSGRTFS

SEQ ID NO: 351 - protein, 30 aa, Artificial
  FR1 sequence
EVQLVESGGGLVQAGGSLRLSCAPSGRTFS

SEQ ID NO: 352 - protein, 30 aa, Artificial
  FR1 sequence
EVQLVESGGGLVQAGGSLRLSCAASGRPVN

SEQ ID NO: 353 - protein, 30 aa, Artificial; identical to SEQ ID NO: 239
  FR1 sequence

SEQ ID NO: 354 - protein, 30 aa, Artificial
  FR1 sequence
EVQLVESGGGLVQAGGSLRLSCAASGRTYN

SEQ ID NO: 355 - protein, 30 aa, Artificial
  FR1 sequence
EVQLVESGGGLVQAGGSLRLSCTASGQTFN

SEQ ID NO: 356 - protein, 30 aa, Artificial
  FR1 sequence
EVQLVESGGAFVQPGGSLRLSCAASGSDVW

SEQ ID NO: 357 - protein, 30 aa, Artificial
  FR1 sequence
EVQLVESGGGLVQAGGSLRLSCTASGRAFN

SEQ ID NO: 358 - protein, 30 aa, Artificial
  FR1 sequence
EVQLVESGGGLVQAGGSLRLSCQLSGGTVS

SEQ ID NO: 359 - protein, 30 aa, Artificial
  FR1 sequence
EVQLVESGGGLVQAGGSLRLSCAASGSIFR

SEQ ID NO: 360 - protein, 30 aa, Artificial
  FR1 sequence
EVQLVESGGGLVQPGGSLRLSCAGSGNIVR

SEQ ID NO: 361 - protein, 30 aa, Artificial; identical to SEQ ID NO: 239
  FR1 sequence

SEQ ID NO: 362 - protein, 30 aa, Artificial
  FR1 sequence
EVQLVESGGGLVQAGGSLRLSCAASGRTFE

SEQ ID NO: 363 - protein, 30 aa, Artificial
  FR1 sequence
EVQLVESGGDLVQPGESLRLSCAVSGVTVD

SEQ ID NO: 364 - protein, 30 aa, Artificial
  FR1 sequence
EVQLVESGGGLVQAGASLRLSCAASGRTFS

SEQ ID NO: 365 - protein, 30 aa, Artificial
  FR1 sequence
EVQLVESGGGLVQTGGSLRLSCAASGRTFS

SEQ ID NO: 366 - protein, 30 aa, Artificial; identical to SEQ ID NO: 239
  FR1 sequence

SEQ ID NO: 367 - protein, 30 aa, Artificial
  FR1 sequence
EVQLVESGGGLVQAGGSLRLSCAVSGLTFS

SEQ ID NO: 368 - protein, 30 aa, Artificial; identical to SEQ ID NO: 367
  FR1 sequence

SEQ ID NO: 369 - protein, 30 aa, Artificial
  FR1 sequence
EVQLVESGGGLVQPGGSLRLSCAASGITFR

SEQ ID NO: 370 - protein, 30 aa, Artificial
  FR1 sequence
EVQLVESGGGLVQAGGSLRLSCTASGGTFG

SEQ ID NO: 371 - protein, 30 aa, Artificial
  FR1 sequence
EVQLVESGGGLVQAGGSLRLSCAASEPTFS

SEQ ID NO: 372 - protein, 30 aa, Artificial
  FR1 sequence
EVQLVESGGGLVQAGGSLRLSCVASGRTSS

SEQ ID NO: 373 - protein, 30 aa, Artificial
  FR1 sequence
EVQLVESGGGLVQAGGSLSLSCAASGRTFS

SEQ ID NO: 374 - protein, 30 aa, Artificial; identical to SEQ ID NO: 239
  FR1 sequence

SEQ ID NO: 375 - protein, 30 aa, Artificial
  FR1 sequence
EVQLVESGGGLVQPGGSLRLSCAASGSSLS

SEQ ID NO: 376 - protein, 30 aa, Artificial
  FR1 sequence
EVQLVESGGGLVQAGGSLRLSCAASGRALS

SEQ ID NO: 377 - protein, 30 aa, Artificial; identical to SEQ ID NO: 349
  FR1 sequence

SEQ ID NO: 378 - protein, 30 aa, Artificial
  FR1 sequence
EVQLVESGGGLVQAGGSLRLSCAASGRTSS

SEQ ID NO: 379 - protein, 30 aa, Artificial
  FR1 sequence
EVQLVESGGGLVQPGGSLRLSCAHSGRAFS

SEQ ID NO: 380 - protein, 30 aa, Artificial; identical to SEQ ID NO: 239
  FR1 sequence

SEQ ID NO: 381 - protein, 30 aa, Artificial
  FR1 sequence
EVQLVESGGGLVQAGGSLRLSCAASGGIFS

SEQ ID NO: 382 - protein, 30 aa, Artificial
  FR1 sequence
EVQLVESGGGLVQAGGSLRLSCAASGRIFS

SEQ ID NO: 383 - protein, 30 aa, Artificial
  FR1 sequence
EVQLVESGGGLVQAGGSLRLSCAASGRTFI

SEQ ID NO: 384 - protein, 30 aa, Artificial
  FR1 sequence
EVQLVESGGGLVQPGGSLRLSCAASGSIDS

SEQ ID NO: 385 - protein, 30 aa, Artificial
  FR1 sequence
EVQLVESGGGLVQSGGSLRLSCVASGTIVS

SEQ ID NO: 386 - protein, 30 aa, Artificial
  FR1 sequence
EVQLVESGGGMVQAGGSLRLSCAASGLTLS

SEQ ID NO: 387 - protein, 30 aa, Artificial; identical to SEQ ID NO: 383
  FR1 sequence

SEQ ID NO: 388 - protein, 30 aa, Artificial; identical to SEQ ID NO: 287
  FR1 sequence

SEQ ID NO: 389 - protein, 30 aa, Artificial
  FR1 sequence
EVQLVESGGGLVQDGGSLRLSCAASGQLAN

SEQ ID NO: 390 - protein, 30 aa, Artificial; identical to SEQ ID NO: 284
  FR1 sequence

SEQ ID NO: 391 - protein, 30 aa, Artificial
  FR1 sequence
EVQLVESGGGLVQAGGSLTLSCVISGLTLE

SEQ ID NO: 392 - protein, 30 aa, Artificial
  FR1 sequence
EVQLVESGGGLVQPGGSLRLSCAASGRTFS

SEQ ID NO: 393 - protein, 30 aa, Artificial
  FR1 sequence
EVQLVESGGGSVQPGGSLRLSCVASGSISS

SEQ ID NO: 394 - protein, 30 aa, Artificial; identical to SEQ ID NO: 393
  FR1 sequence

SEQ ID NO: 395 - protein, 30 aa, Artificial
  FR1 sequence
EVQLVESGGGLVQPGGSLRLSCAASGNIKS

SEQ ID NO: 396 - protein, 30 aa, Artificial
  FR1 sequence
EVQLVESGGGLVQAGGSLRLSCAASGFSFA

SEQ ID NO: 397 - protein, 30 aa, Artificial
  FR1 sequence
EVQLVESGGGLVQPGGSLRLSCAASGFPFG

SEQ ID NO: 398 - protein, 30 aa, Artificial
  FR1 sequence
EVQLVESGGGLEQAGGSLRLSCAASGLTFR

SEQ ID NO: 399 - protein, 30 aa, Artificial
  FR1 sequence
EVQLVESGGGLVQAGGSLRLSCAASGFSLD

SEQ ID NO: 400 - protein, 30 aa, Artificial
  FR1 sequence
EMQLVESGGGLVQPGGSLRLSCAASGNIPP

SEQ ID NO: 401 - protein, 5 aa, Artificial
  CDR1 sequence
DYGMT

SEQ ID NO: 402 - protein, 5 aa, Artificial
  CDR1 sequence
DYAMT

SEQ ID NO: 403 - protein, 5 aa, Artificial
  CDR1 sequence
DYGMT

SEQ ID NO: 404 - protein, 5 aa, Artificial
  CDR1 sequence
DYGMT

SEQ ID NO: 405 - protein, 5 aa, Artificial
  CDR1 sequence
DYGMT

SEQ ID NO: 406 - protein, 5 aa, Artificial
  CDR1 sequence
DYGMT

SEQ ID NO: 407 - protein, 5 aa, Artificial
  CDR1 sequence
DYGMT

SEQ ID NO: 408 - protein, 5 aa, Artificial
  CDR1 sequence
RYTMG

SEQ ID NO: 409 - protein, 5 aa, Artificial
  CDR1 sequence
DYGMT

SEQ ID NO: 410 - protein, 5 aa, Artificial
  CDR1 sequence
DYGMT

SEQ ID NO: 411 - protein, 5 aa, Artificial
  CDR1 sequence
DYGMT

SEQ ID NO: 412 - protein, 5 aa, Artificial
  CDR1 sequence
DYGMT

SEQ ID NO: 413 - protein, 5 aa, Artificial
  CDR1 sequence
DYAMT

SEQ ID NO: 414 - protein, 5 aa, Artificial
  CDR1 sequence
DYGMT

SEQ ID NO: 415 - protein, 5 aa, Artificial
  CDR1 sequence
DYGMT

SEQ ID NO: 416 - protein, 5 aa, Artificial
  CDR1 sequence
DYGMT

SEQ ID NO: 417 - protein, 5 aa, Artificial
  CDR1 sequence
DYGMT

SEQ ID NO: 418 - protein, 5 aa, Artificial
  CDR1 sequence
DYGMT

SEQ ID NO: 419 - protein, 5 aa, Artificial
  CDR1 sequence
DYGMT

SEQ ID NO: 420 - protein, 5 aa, Artificial
  CDR1 sequence
DYGMT

SEQ ID NO: 421 - protein, 5 aa, Artificial
  CDR1 sequence
DYGMT

SEQ ID NO: 422 - protein, 5 aa, Artificial
  CDR1 sequence
DYGMT

SEQ ID NO: 423 - protein, 5 aa, Artificial
  CDR1 sequence
DYGMT

SEQ ID NO: 424 - protein, 5 aa, Artificial
  CDR1 sequence
DYAMT

SEQ ID NO: 425 - protein, 5 aa, Artificial
  CDR1 sequence
DYAMT

SEQ ID NO: 426 - protein, 5 aa, Artificial
  CDR1 sequence
DYGMT

SEQ ID NO: 427 - protein, 5 aa, Artificial
  CDR1 sequence
DYGMT

SEQ ID NO: 428 - protein, 5 aa, Artificial
  CDR1 sequence
DYGMT

SEQ ID NO: 429 - protein, 5 aa, Artificial
  CDR1 sequence
NYAMT

SEQ ID NO: 430 - protein, 5 aa, Artificial
  CDR1 sequence
DYGMT

SEQ ID NO: 431 - protein, 5 aa, Artificial
  CDR1 sequence
DYAMT

SEQ ID NO: 432 - protein, 5 aa, Artificial
  CDR1 sequence
DYAMS

SEQ ID NO: 433 - protein, 5 aa, Artificial
  CDR1 sequence
DYAMS

SEQ ID NO: 434 - protein, 5 aa, Artificial
  CDR1 sequence
DYAMS

SEQ ID NO: 435 - protein, 5 aa, Artificial
  CDR1 sequence
DYAMS

SEQ ID NO: 436 - protein, 5 aa, Artificial
  CDR1 sequence
DYAMS

SEQ ID NO: 437 - protein, 5 aa, Artificial
  CDR1 sequence
DYAMS

SEQ ID NO: 438 - protein, 5 aa, Artificial
  CDR1 sequence
DYAMS

SEQ ID NO: 439 - protein, 5 aa, Artificial
  CDR1 sequence
DYAMS

SEQ ID NO: 440 - protein, 5 aa, Artificial
  CDR1 sequence
DYAMS

SEQ ID NO: 441 - protein, 5 aa, Artificial
  CDR1 sequence
DYAMS

SEQ ID NO: 442 - protein, 5 aa, Artificial
  CDR1 sequence
DYALS

SEQ ID NO: 443 - protein, 5 aa, Artificial
  CDR1 sequence
DYAMT

SEQ ID NO: 444 - protein, 5 aa, Artificial
  CDR1 sequence
DYAMT

SEQ ID NO: 445 - protein, 5 aa, Artificial
  CDR1 sequence
DYAMS

SEQ ID NO: 446 - protein, 5 aa, Artificial
  CDR1 sequence
DYAMT

SEQ ID NO: 447 - protein, 5 aa, Artificial
  CDR1 sequence
DYAMT

SEQ ID NO: 448 - protein, 5 aa, Artificial
  CDR1 sequence
DYAMS

SEQ ID NO: 449 - protein, 5 aa, Artificial
  CDR1 sequence
DYAMT

SEQ ID NO: 450 - protein, 5 aa, Artificial
  CDR1 sequence
DYAMS

SEQ ID NO: 451 - protein, 5 aa, Artificial
  CDR1 sequence
DYGMS

SEQ ID NO: 452 - protein, 5 aa, Artificial
  CDR1 sequence
DYAMT

SEQ ID NO: 453 - protein, 5 aa, Artificial
  CDR1 sequence
DYAMT

SEQ ID NO: 454 - protein, 5 aa, Artificial
  CDR1 sequence
DYAMT

SEQ ID NO: 455 - protein, 5 aa, Artificial
  CDR1 sequence
DYAMT

SEQ ID NO: 456 - protein, 5 aa, Artificial
  CDR1 sequence
DYAMT

SEQ ID NO: 457 - protein, 5 aa, Artificial
  CDR1 sequence
DYAMT

SEQ ID NO: 458 - protein, 5 aa, Artificial
  CDR1 sequence
DYAMT

SEQ ID NO: 459 - protein, 5 aa, Artificial
  CDR1 sequence
DYGMS

SEQ ID NO: 460 - protein, 5 aa, Artificial
  CDR1 sequence
DYAMT

SEQ ID NO: 461 - protein, 5 aa, Artificial
  CDR1 sequence
DYAMS

SEQ ID NO: 462 - protein, 5 aa, Artificial
  CDR1 sequence
INTMG

SEQ ID NO: 463 - protein, 5 aa, Artificial
  CDR1 sequence
EYAAA

SEQ ID NO: 464 - protein, 5 aa, Artificial
  CDR1 sequence
FNDMA

SEQ ID NO: 465 - protein, 5 aa, Artificial
  CDR1 sequence
SYGMG

SEQ ID NO: 466 - protein, 5 aa, Artificial
  CDR1 sequence
SYGMG

SEQ ID NO: 467 - protein, 5 aa, Artificial
  CDR1 sequence
SYGMG

SEQ ID NO: 468 - protein, 5 aa, Artificial
  CDR1 sequence
SYGMG

SEQ ID NO: 469 - protein, 5 aa, Artificial
  CDR1 sequence
SYGMG

SEQ ID NO: 470 - protein, 5 aa, Artificial
  CDR1 sequence
SYGMG

SEQ ID NO: 471 - protein, 5 aa, Artificial
  CDR1 sequence
SYGMG

SEQ ID NO: 472 - protein, 5 aa, Artificial
  CDR1 sequence
SYGMG

SEQ ID NO: 473 - protein, 5 aa, Artificial
  CDR1 sequence
SYGMG

SEQ ID NO: 474 - protein, 5 aa, Artificial
  CDR1 sequence
SYGMG

SEQ ID NO: 475 - protein, 5 aa, Artificial
  CDR1 sequence
SYGMG

SEQ ID NO: 476 - protein, 5 aa, Artificial
  CDR1 sequence
SYGMG

SEQ ID NO: 477 - protein, 5 aa, Artificial
  CDR1 sequence
RYDMG

SEQ ID NO: 478 - protein, 5 aa, Artificial
  CDR1 sequence
EYSMG

SEQ ID NO: 479 - protein, 5 aa, Artificial
  CDR1 sequence
DYGIG

SEQ ID NO: 480 - protein, 5 aa, Artificial
  CDR1 sequence
SYAMS

SEQ ID NO: 481 - protein, 5 aa, Artificial
  CDR1 sequence
TSAMG

SEQ ID NO: 482 - protein, 5 aa, Artificial
  CDR1 sequence
TRTMA

SEQ ID NO: 483 - protein, 5 aa, Artificial
  CDR1 sequence
TRTMA

SEQ ID NO: 484 - protein, 5 aa, Artificial
  CDR1 sequence
TRTMA

SEQ ID NO: 485 - protein, 5 aa, Artificial
  CDR1 sequence
SRTMA

SEQ ID NO: 486 - protein, 5 aa, Artificial
  CDR1 sequence
TRTMA

SEQ ID NO: 487 - protein, 5 aa, Artificial
  CDR1 sequence
TRTMA

SEQ ID NO: 488 - protein, 5 aa, Artificial
  CDR1 sequence
TRTMA

SEQ ID NO: 489 - protein, 5 aa, Artificial
  CDR1 sequence
TRTMA

SEQ ID NO: 490 - protein, 5 aa, Artificial
  CDR1 sequence
IRTMA

SEQ ID NO: 491 - protein, 5 aa, Artificial
  CDR1 sequence
IRTMA

SEQ ID NO: 492 - protein, 5 aa, Artificial
  CDR1 sequence
IRTMA

SEQ ID NO: 493 - protein, 5 aa, Artificial
  CDR1 sequence
IRTMA

SEQ ID NO: 494 - protein, 5 aa, Artificial
  CDR1 sequence
SRTMA

SEQ ID NO: 495 - protein, 5 aa, Artificial
  CDR1 sequence
RYVMG

SEQ ID NO: 496 - protein, 5 aa, Artificial
  CDR1 sequence
RYDMG

SEQ ID NO: 497 - protein, 5 aa, Artificial
  CDR1 sequence
RYDMG

SEQ ID NO: 498 - protein, 7 aa, Artificial
  CDR1 sequence
FSRRTMA

SEQ ID NO: 499 - protein, 7 aa, Artificial
  CDR1 sequence
FSRRTMA

SEQ ID NO: 500 - protein, 5 aa, Artificial
  CDR1 sequence
IRVMA

SEQ ID NO: 501 - protein, 5 aa, Artificial
  CDR1 sequence
IRTMA

SEQ ID NO: 502 - protein, 4 aa, Artificial
  CDR1 sequence
RAIA

SEQ ID NO: 503 - protein, 7 aa, Artificial
  CDR1 sequence
FSRRTMA

SEQ ID NO: 504 - protein, 5 aa, Artificial
  CDR1 sequence
IRTMA

SEQ ID NO: 505 - protein, 5 aa, Artificial
  CDR1 sequence
IRAMA

SEQ ID NO: 506 - protein, 5 aa, Artificial
  CDR1 sequence
IRAMA

SEQ ID NO: 507 - protein, 4 aa, Artificial
  CDR1 sequence
HAMA

SEQ ID NO: 508 - protein, 5 aa, Artificial
  CDR1 sequence
IRTMA

SEQ ID NO: 509 - protein, 5 aa, Artificial
  CDR1 sequence
IRTMA

SEQ ID NO: 510 - protein, 5 aa, Artificial
  CDR1 sequence
IRTMA

SEQ ID NO: 511 - protein, 5 aa, Artificial
  CDR1 sequence
IRAMA

SEQ ID NO: 512 - protein, 5 aa, Artificial
  CDR1 sequence
IRAMA

SEQ ID NO: 513 - protein, 5 aa, Artificial
  CDR1 sequence
IRAMA

SEQ ID NO: 514 - protein, 5 aa, Artificial
  CDR1 sequence
DDAMG

SEQ ID NO: 515 - protein, 5 aa, Artificial
  CDR1 sequence
DDAVG

SEQ ID NO: 516 - protein, 5 aa, Artificial
  CDR1 sequence
TDMMG

SEQ ID NO: 517 - protein, 5 aa, Artificial
  CDR1 sequence
LRAMA

SEQ ID NO: 518 - protein, 6 aa, Artificial
  CDR1 sequence
DSNAIG

SEQ ID NO: 519 - protein, 5 aa, Artificial
  CDR1 sequence
LDIMA

SEQ ID NO: 520 - protein, 5 aa, Artificial
  CDR1 sequence
TRVMA

SEQ ID NO: 521 - protein, 5 aa, Artificial
  CDR1 sequence
TRVMA

SEQ ID NO: 522 - protein, 5 aa, Artificial
  CDR1 sequence
TRVMA

SEQ ID NO: 523 - protein, 5 aa, Artificial
  CDR1 sequence
TRVMA

SEQ ID NO: 524 - protein, 5 aa, Artificial
  CDR1 sequence
TRVMA

SEQ ID NO: 525 - protein, 5 aa, Artificial
  CDR1 sequence
IRTMA

SEQ ID NO: 526 - protein, 5 aa, Artificial
  CDR1 sequence
FNTVA

SEQ ID NO: 527 - protein, 5 aa, Artificial
  CDR1 sequence
FRTMA

SEQ ID NO: 528 - protein, 5 aa, Artificial
  CDR1 sequence
IRAMA

SEQ ID NO: 529 - protein, 7 aa, Artificial
  CDR1 sequence
FSSRTMA

SEQ ID NO: 530 - protein, 5 aa, Artificial
  CDR1 sequence
FRTMA

SEQ ID NO: 531 - protein, 5 aa, Artificial
  CDR1 sequence
FRTLA

SEQ ID NO: 532 - protein, 7 aa, Artificial
  CDR1 sequence
FSRRTMA

SEQ ID NO: 533 - protein, 5 aa, Artificial
  CDR1 sequence
NYAMT

SEQ ID NO: 534 - protein, 5 aa, Artificial
  CDR1 sequence
RYTMG

SEQ ID NO: 535 - protein, 5 aa, Artificial
  CDR1 sequence
RYTMG

SEQ ID NO: 536 - protein, 5 aa, Artificial
  CDR1 sequence
RYIMD

SEQ ID NO: 537 - protein, 5 aa, Artificial
  CDR1 sequence
RYTMG

SEQ ID NO: 538 - protein, 5 aa, Artificial
  CDR1 sequence
RYDMG

SEQ ID NO: 539 - protein, 5 aa, Artificial
  CDR1 sequence
FDSMG

SEQ ID NO: 540 - protein, 5 aa, Artificial
  CDR1 sequence
HNAMG

SEQ ID NO: 541 - protein, 5 aa, Artificial
  CDR1 sequence
TYVMG

SEQ ID NO: 542 - protein, 5 aa, Artificial
  CDR1 sequence
DYSMS

SEQ ID NO: 543 - protein, 5 aa, Artificial
  CDR1 sequence
SYRMY

SEQ ID NO: 544 - protein, 5 aa, Artificial
  CDR1 sequence
INRMA

SEQ ID NO: 545 - protein, 5 aa, Artificial
  CDR1 sequence
INRWG

SEQ ID NO: 546 - protein, 4 aa, Artificial
  CDR1 sequence
FDNN

SEQ ID NO: 547 - protein, 5 aa, Artificial
  CDR1 sequence
SYAMS

SEQ ID NO: 548 - protein, 5 aa, Artificial
  CDR1 sequence
SYAMS

SEQ ID NO: 549 - protein, 5 aa, Artificial
  CDR1 sequence
YCAIG

SEQ ID NO: 550 - protein, 5 aa, Artificial
  CDR1 sequence
DYAMS

SEQ ID NO: 551 - protein, 5 aa, Artificial
  CDR1 sequence
IRTMA

SEQ ID NO: 552 - protein, 5 aa, Artificial
  CDR1 sequence
IRTMA

SEQ ID NO: 553 - protein, 5 aa, Artificial
  CDR1 sequence
IRTMA

SEQ ID NO: 554 - protein, 5 aa, Artificial
  CDR1 sequence
IRTMA

SEQ ID NO: 555 - protein, 3 aa, Artificial
  CDR1 sequence
PMG

SEQ ID NO: 556 - protein, 5 aa, Artificial
  CDR1 sequence
DYATS

SEQ ID NO: 557 - protein, 3 aa, Artificial
  CDR1 sequence
AMG

SEQ ID NO: 558 - protein, 5 aa, Artificial
  CDR1 sequence
SYAMA

SEQ ID NO: 559 - protein, 5 aa, Artificial
  CDR1 sequence
SYAMA

SEQ ID NO: 560 - protein, 5 aa, Artificial
  CDR1 sequence
SYAMA

SEQ ID NO: 561 - protein, 5 aa, Artificial
  CDR1 sequence
SYAMG

SEQ ID NO: 562 - protein, 5 aa, Artificial
  CDR1 sequence
NYALA

SEQ ID NO: 563 - protein, 5 aa, Artificial
  CDR1 sequence
RFAMG

SEQ ID NO: 564 - protein, 5 aa, Artificial
  CDR1 sequence
SYAMA

SEQ ID NO: 565 - protein, 5 aa, Artificial
  CDR1 sequence
SLTMA

SEQ ID NO: 566 - protein, 5 aa, Artificial
  CDR1 sequence
IKSMG

SEQ ID NO: 567 - protein, 5 aa, Artificial
  CDR1 sequence
SSLMG

SEQ ID NO: 568 - protein, 5 aa, Artificial
  CDR1 sequence
SYAMG

SEQ ID NO: 569 - protein, 6 aa, Artificial
  CDR1 sequence
TYASMG

SEQ ID NO: 570 - protein, 5 aa, Artificial
  CDR1 sequence
IITMG

SEQ ID NO: 571 - protein, 5 aa, Artificial
  CDR1 sequence
DYAIG

SEQ ID NO: 572 - protein, 5 aa, Artificial
  CDR1 sequence
NHIMG

SEQ ID NO: 573 - protein, 5 aa, Artificial
  CDR1 sequence
DYAIG

SEQ ID NO: 574 - protein, 5 aa, Artificial
  CDR1 sequence
SAGVG

SEQ ID NO: 575 - protein, 5 aa, Artificial
  CDR1 sequence
RSRVA

SEQ ID NO: 576 - protein, 5 aa, Artificial
  CDR1 sequence
ADVMG

SEQ ID NO: 577 - protein, 5 aa, Artificial
  CDR1 sequence
MNDMG

SEQ ID NO: 578 - protein, 3 aa, Artificial
  CDR1 sequence
GMA

SEQ ID NO: 579 - protein, 5 aa, Artificial
  CDR1 sequence
TRAMG

SEQ ID NO: 580 - protein, 5 aa, Artificial
  CDR1 sequence
NYAMG

SEQ ID NO: 581 - protein, 5 aa, Artificial
  CDR1 sequence
SYAMG

SEQ ID NO: 582 - protein, 5 aa, Artificial
  CDR1 sequence
AYAMG

SEQ ID NO: 583 - protein, 5 aa, Artificial
  CDR1 sequence
SDTMA

SEQ ID NO: 584 - protein, 5 aa, Artificial
  CDR1 sequence
SNAMA

SEQ ID NO: 585 - protein, 5 aa, Artificial
  CDR1 sequence
TYTMG

SEQ ID NO: 586 - protein, 5 aa, Artificial
  CDR1 sequence
SYSMG

SEQ ID NO: 587 - protein, 4 aa, Artificial
  CDR1 sequence
TTMG

SEQ ID NO: 588 - protein, 5 aa, Artificial
  CDR1 sequence
SYAMG

SEQ ID NO: 589 - protein, 5 aa, Artificial
  CDR1 sequence
VYHMA

SEQ ID NO: 590 - protein, 5 aa, Artificial
  CDR1 sequence
VYHMG

SEQ ID NO: 591 - protein, 5 aa, Artificial
  CDR1 sequence
VYHMG

SEQ ID NO: 592 - protein, 5 aa, Artificial
  CDR1 sequence
VYHMG

SEQ ID NO: 593 - protein, 5 aa, Artificial
  CDR1 sequence
VYTMA

SEQ ID NO: 594 - protein, 5 aa, Artificial
  CDR1 sequence
VYHMG

SEQ ID NO: 595 - protein, 5 aa, Artificial
  CDR1 sequence
PYTMA

SEQ ID NO: 596 - protein, 5 aa, Artificial
  CDR1 sequence
SYAMS

SEQ ID NO: 597 - protein, 5 aa, Artificial
  CDR1 sequence
SGVMA

SEQ ID NO: 598 - protein, 5 aa, Artificial
  CDR1 sequence
GYAMG

SEQ ID NO: 599 - protein, 5 aa, Artificial
  CDR1 sequence
TYGMG

SEQ ID NO: 600 - protein, 5 aa, Artificial
  CDR1 sequence
DYTMG

SEQ ID NO: 601 - protein, 5 aa, Artificial
  CDR1 sequence
SAAMG

SEQ ID NO: 602 - protein, 5 aa, Artificial
  CDR1 sequence
GDVIG

SEQ ID NO: 603 - protein, 3 aa, Artificial
  CDR1 sequence
TMG

SEQ ID NO: 604 - protein, 5 aa, Artificial
  CDR1 sequence
TTGVG

SEQ ID NO: 605 - protein, 5 aa, Artificial
  CDR1 sequence
TTGVG

SEQ ID NO: 606 - protein, 5 aa, Artificial
  CDR1 sequence
RDVMG

SEQ ID NO: 607 - protein, 5 aa, Artificial
  CDR1 sequence
TTGVG

SEQ ID NO: 608 - protein, 5 aa, Artificial
  CDR1 sequence
SYHIG

SEQ ID NO: 609 - protein, 5 aa, Artificial
  CDR1 sequence
INAMG

SEQ ID NO: 610 - protein, 5 aa, Artificial
  CDR1 sequence
TYTMA

SEQ ID NO: 611 - protein, 5 aa, Artificial
  CDR1 sequence
PNVVG

SEQ ID NO: 612 - protein, 5 aa, Artificial
  CDR1 sequence
RYKMG

SEQ ID NO: 613 - protein, 5 aa, Artificial
  CDR1 sequence
SYAMG

SEQ ID NO: 614 - protein, 5 aa, Artificial
  CDR1 sequence
VSVMG

SEQ ID NO: 615 - protein, 5 aa, Artificial
  CDR1 sequence
INTMG

SEQ ID NO: 616 - protein, 5 aa, Artificial
  CDR1 sequence
INIMG

SEQ ID NO: 617 - protein, 5 aa, Artificial
  CDR1 sequence
INTMG

SEQ ID NO: 618 - protein, 5 aa, Artificial
  CDR1 sequence
FNDMG

SEQ ID NO: 619 - protein, 5 aa, Artificial
  CDR1 sequence
GRGMG

SEQ ID NO: 620 - protein, 5 aa, Artificial
  CDR1 sequence
GRAVG

SEQ ID NO: 621 - protein, 5 aa, Artificial
  CDR1 sequence
GRAMG

SEQ ID NO: 622 - protein, 5 aa, Artificial
  CDR1 sequence
NDHMG

SEQ ID NO: 623 - protein, 5 aa, Artificial
  CDR1 sequence
INAMG

SEQ ID NO: 624 - protein, 5 aa, Artificial
  CDR1 sequence
NYAMG

SEQ ID NO: 625 - protein, 5 aa, Artificial
  CDR1 sequence
SYVMG

SEQ ID NO: 626 - protein, 5 aa, Artificial
  CDR1 sequence
SYVMG

SEQ ID NO: 627 - protein, 5 aa, Artificial
  CDR1 sequence
NYIMG

SEQ ID NO: 628 - protein, 5 aa, Artificial
  CDR1 sequence
AYAMG

SEQ ID NO: 629 - protein, 2 aa, Artificial
  CDR1 sequence
MA

SEQ ID NO: 630 - protein, 2 aa, Artificial
  CDR1 sequence
MG

SEQ ID NO: 631 - protein, 5 aa, Artificial
  CDR1 sequence
FNVMG

SEQ ID NO: 632 - protein, 2 aa, Artificial
  CDR1 sequence
MG

SEQ ID NO: 633 - protein, 5 aa, Artificial
  CDR1 sequence
DLHMG

SEQ ID NO: 634 - protein, 5 aa, Artificial
  CDR1 sequence
VNHMG

SEQ ID NO: 635 - protein, 5 aa, Artificial
  CDR1 sequence
DNTMA

SEQ ID NO: 636 - protein, 5 aa, Artificial
  CDR1 sequence
MYLMG

SEQ ID NO: 637 - protein, 5 aa, Artificial
  CDR1 sequence
RYAMG

SEQ ID NO: 638 - protein, 5 aa, Artificial
  CDR1 sequence
YSGIG

SEQ ID NO: 639 - protein, 5 aa, Artificial
  CDR1 sequence
RYDIG

SEQ ID NO: 640 - protein, 5 aa, Artificial
  CDR1 sequence
GSRMG

SEQ ID NO: 641 - protein, 5 aa, Artificial
  CDR1 sequence
GSRMG

SEQ ID NO: 642 - protein, 5 aa, Artificial
  CDR1 sequence
SYAMG

SEQ ID NO: 643 - protein, 5 aa, Artificial
  CDR1 sequence
TYAMG

SEQ ID NO: 644 - protein, 5 aa, Artificial
  CDR1 sequence
FKAMG

SEQ ID NO: 645 - protein, 5 aa, Artificial
  CDR1 sequence
SYALG

SEQ ID NO: 646 - protein, 5 aa, Artificial
  CDR1 sequence
SVAMG

SEQ ID NO: 647 - protein, 5 aa, Artificial
  CDR1 sequence
YYHMA

SEQ ID NO: 648 - protein, 5 aa, Artificial
  CDR1 sequence
NYRMA

SEQ ID NO: 649 - protein, 5 aa, Artificial
  CDR1 sequence
RYAMH

SEQ ID NO: 650 - protein, 5 aa, Artificial
  CDR1 sequence
FNAMG

SEQ ID NO: 651 - protein, 5 aa, Artificial
  CDR1 sequence
NYAMR

SEQ ID NO: 652 - protein, 5 aa, Artificial
  CDR1 sequence
SFAMR

SEQ ID NO: 653 - protein, 5 aa, Artificial
  CDR1 sequence
GYGMG

SEQ ID NO: 654 - protein, 5 aa, Artificial
  CDR1 sequence
LRTMG

SEQ ID NO: 655 - protein, 5 aa, Artificial
  CDR1 sequence
RYAMG

SEQ ID NO: 656 - protein, 5 aa, Artificial
  CDR1 sequence
SHAIS

SEQ ID NO: 657 - protein, 5 aa, Artificial
  CDR1 sequence
NYAWS

SEQ ID NO: 658 - protein, 5 aa, Artificial
  CDR1 sequence
SSPMG

SEQ ID NO: 659 - protein, 5 aa, Artificial
  CDR1 sequence
IHVVG

SEQ ID NO: 660 - protein, 5 aa, Artificial
  CDR1 sequence
INATS

SEQ ID NO: 661 - protein, 5 aa, Artificial
  CDR1 sequence
NYGMG

SEQ ID NO: 662 - protein, 6 aa, Artificial
  CDR1 sequence
SNYAMG

SEQ ID NO: 663 - protein, 5 aa, Artificial
  CDR1 sequence
GYSVG

SEQ ID NO: 664 - protein, 7 aa, Artificial
  CDR1 sequence
FASYAMG

SEQ ID NO: 665 - protein, 5 aa, Artificial
  CDR1 sequence
NYSVG

SEQ ID NO: 666 - protein, 5 aa, Artificial
  CDR1 sequence
SHAMG

SEQ ID NO: 667 - protein, 5 aa, Artificial
  CDR1 sequence
DLALG

SEQ ID NO: 668 - protein, 5 aa, Artificial
  CDR1 sequence
TNAMG

SEQ ID NO: 669 - protein, 5 aa, Artificial
  CDR1 sequence
VNAMG

SEQ ID NO: 670 - protein, 5 aa, Artificial
  CDR1 sequence
IDVMG

SEQ ID NO: 671 - protein, 5 aa, Artificial
  CDR1 sequence
DYAIG

SEQ ID NO: 672 - protein, 5 aa, Artificial
  CDR1 sequence
MYGMR

SEQ ID NO: 673 - protein, 5 aa, Artificial
  CDR1 sequence
SAAMG

SEQ ID NO: 674 - protein, 5 aa, Artificial
  CDR1 sequence
DRAIA

SEQ ID NO: 675 - protein, 5 aa, Artificial
  CDR1 sequence
INAMA

SEQ ID NO: 676 - protein, 14 aa, Artificial
  FR2 sequence
WVRRAPGKGLEWVS

SEQ ID NO: 677 - protein, 14 aa, Artificial
  FR2 sequence
WVRQAPGKGLEWVS

SEQ ID NO: 678 - protein, 14 aa, Artificial
  FR2 sequence
WVRQAPGKGLEWVS

SEQ ID NO: 679 - protein, 14 aa, Artificial
  FR2 sequence
WVRQAPGKGLEWVS

SEQ ID NO: 680 - protein, 14 aa, Artificial
  FR2 sequence
WVRQAPGKGLEWVS

SEQ ID NO: 681 - protein, 14 aa, Artificial
  FR2 sequence
WVRQAPGKGLEWVS

SEQ ID NO: 682 - protein, 14 aa, Artificial
  FR2 sequence
WVRQAPGKGLEWVS

SEQ ID NO: 683 - protein, 14 aa, Artificial
  FR2 sequence
WYRQAPGKQRDLVA

SEQ ID NO: 684 - protein, 14 aa, Artificial
  FR2 sequence
WVRQAPGKGLEWVS

SEQ ID NO: 685 - protein, 14 aa, Artificial
  FR2 sequence
WVRQAPGKGLEWVS

SEQ ID NO: 686 - protein, 14 aa, Artificial
  FR2 sequence
WVRQAPGKELEWIS

SEQ ID NO: 687 - protein, 14 aa, Artificial
  FR2 sequence
WVRQAPGKGLEWVS

SEQ ID NO: 688 - protein, 14 aa, Artificial
  FR2 sequence
WVRQAPGKGLEWVS

SEQ ID NO: 689 - protein, 14 aa, Artificial
  FR2 sequence
WVRQAPGKGLEWVS

SEQ ID NO: 690 - protein, 14 aa, Artificial
  FR2 sequence
WVRQAPGKGFEWVS

SEQ ID NO: 691 - protein, 14 aa, Artificial
  FR2 sequence
WVRQAPGKGLEWVS

SEQ ID NO: 692 - protein, 14 aa, Artificial
  FR2 sequence
WVRQAPGKGLEWVS

SEQ ID NO: 693 - protein, 14 aa, Artificial
  FR2 sequence
WVRQAPGKGLEWVS

SEQ ID NO: 694 - protein, 14 aa, Artificial
  FR2 sequence
WVRQAPGKGLEWVS

SEQ ID NO: 695 - protein, 14 aa, Artificial
  FR2 sequence
WVRQAPGKGLEWVS

SEQ ID NO: 696 - protein, 14 aa, Artificial
  FR2 sequence
WVRQAPGKGLEWVS

SEQ ID NO: 697 - protein, 14 aa, Artificial
  FR2 sequence
WVRQAPGKGLEWVS

SEQ ID NO: 698 - protein, 14 aa, Artificial
  FR2 sequence
WVRQAPGKGLEWVS

SEQ ID NO: 699 - protein, 14 aa, Artificial
  FR2 sequence
WVRQAPGKGLEWVS

SEQ ID NO: 700 - protein, 14 aa, Artificial
  FR2 sequence
WVRQAPGKGLEWVS

SEQ ID NO: 701 - protein, 14 aa, Artificial
  FR2 sequence
WVRQAPGKGLEWVS

SEQ ID NO: 702 - protein, 14 aa, Artificial
  FR2 sequence
WVRQAPGKGLEWVS

SEQ ID NO: 703 - protein, 14 aa, Artificial
  FR2 sequence
WVRQAPGKGLEWVS

SEQ ID NO: 704 - protein, 14 aa, Artificial
  FR2 sequence
WVRQAPGKGLEWVS

SEQ ID NO: 705 - protein, 14 aa, Artificial
  FR2 sequence
WVRQAPGKGLEWVS

SEQ ID NO: 706 - protein, 14 aa, Artificial
  FR2 sequence
WVRQAPGKGLEWVS

SEQ ID NO: 707 - protein, 14 aa, Artificial
  FR2 sequence
WVRQAPGKGLEWVS

SEQ ID NO: 708 - protein, 14 aa, Artificial
  FR2 sequence
WVRQAPGKGLEWVS

SEQ ID NO: 709 - protein, 14 aa, Artificial
  FR2 sequence
WVRQAPGKGLEWVS

SEQ ID NO: 710 - protein, 14 aa, Artificial
  FR2 sequence
WVRQAPGKGLEWVS

SEQ ID NO: 711 - protein, 14 aa, Artificial
  FR2 sequence
WVRQAPGKGLEWIS

SEQ ID NO: 712 - protein, 14 aa, Artificial
  FR2 sequence
WVRQAPGKGLEWIS

SEQ ID NO: 713 - protein, 14 aa, Artificial
  FR2 sequence
WVRQAPGKGLEWVS

SEQ ID NO: 714 - protein, 14 aa, Artificial
  FR2 sequence
WVRQAPGKGLEWIS

SEQ ID NO: 715 - protein, 14 aa, Artificial
  FR2 sequence
WVRQVPGKGLEWVS

SEQ ID NO: 716 - protein, 14 aa, Artificial
  FR2 sequence
WVRQAPGKGLEWVS

SEQ ID NO: 717 - protein, 14 aa, Artificial
  FR2 sequence
WVRQAPGKGLEWIS

SEQ ID NO: 718 - protein, 14 aa, Artificial
  FR2 sequence
WVRQAPGKGLEWVS

SEQ ID NO: 719 - protein, 14 aa, Artificial
  FR2 sequence
WVRQASGKGLEWVS

SEQ ID NO: 720 - protein, 14 aa, Artificial
  FR2 sequence
WVRQAPGKGLEWVS

SEQ ID NO: 721 - protein, 14 aa, Artificial
  FR2 sequence
WVRQAPGKGLEWVS

SEQ ID NO: 722 - protein, 14 aa, Artificial
  FR2 sequence
WVRQAPGKGLEWVS

SEQ ID NO: 723 - protein, 14 aa, Artificial
  FR2 sequence
WVRQAPGKGLEWVS

SEQ ID NO: 724 - protein, 14 aa, Artificial
  FR2 sequence
WVRQAPGKGLEWVS

SEQ ID NO: 725 - protein, 14 aa, Artificial
  FR2 sequence
WVRQAPGKGLEWVS

SEQ ID NO: 726 - protein, 14 aa, Artificial
  FR2 sequence
WVRQAPGKGLEWVS

SEQ ID NO: 727 - protein, 14 aa, Artificial
  FR2 sequence
WVRQAPGKGLEWVS

SEQ ID NO: 728 - protein, 14 aa, Artificial
  FR2 sequence
WVRQAPGKGLEWVS

SEQ ID NO: 729 - protein, 14 aa, Artificial
  FR2 sequence
WVRQAPGKGLEWVS

SEQ ID NO: 730 - protein, 14 aa, Artificial
  FR2 sequence
WVRQAPGKGLEWVS

SEQ ID NO: 731 - protein, 14 aa, Artificial
  FR2 sequence
WVRQASGKGLEWVS

SEQ ID NO: 732 - protein, 14 aa, Artificial
  FR2 sequence
WVRQAPGKGLEWVS

SEQ ID NO: 733 - protein, 14 aa, Artificial
  FR2 sequence
WVRQAPGKGLEWVS

SEQ ID NO: 734 - protein, 14 aa, Artificial
  FR2 sequence
WVRQAPGKGLEWVS

SEQ ID NO: 735 - protein, 14 aa, Artificial
  FR2 sequence
WVRQTPGKGLEWVS

SEQ ID NO: 736 - protein, 14 aa, Artificial
  FR2 sequence
WVRQVPGKGLEWVS

SEQ ID NO: 737 - protein, 14 aa, Artificial
  FR2 sequence
WYRQAPGKQRELVA

SEQ ID NO: 738 - protein, 14 aa, Artificial
  FR2 sequence
WFRQSPGKERDLVA

SEQ ID NO: 739 - protein, 14 aa, Artificial
  FR2 sequence
WYRQAPGKQRELVA

SEQ ID NO: 740 - protein, 14 aa, Artificial
  FR2 sequence
WFRQVPGKEREFVA

SEQ ID NO: 741 - protein, 14 aa, Artificial
  FR2 sequence
WFRQAPGKEREFVA

SEQ ID NO: 742 - protein, 14 aa, Artificial
  FR2 sequence
WFRQAPGKDREFVA

SEQ ID NO: 743 - protein, 14 aa, Artificial
  FR2 sequence
WFRQAPGKEREFVA

SEQ ID NO: 744 - protein, 14 aa, Artificial
  FR2 sequence
WFRQAPGKDREFVA

SEQ ID NO: 745 - protein, 14 aa, Artificial
  FR2 sequence
WFRQAPGKERAFVA

SEQ ID NO: 746 - protein, 14 aa, Artificial
  FR2 sequence
WFRQAPGKERAFVA

SEQ ID NO: 747 - protein, 14 aa, Artificial
  FR2 sequence
WFRQAPGKERAFVA

SEQ ID NO: 748 - protein, 14 aa, Artificial
  FR2 sequence
WFRQAPGKERAFVA

SEQ ID NO: 749 - protein, 14 aa, Artificial
  FR2 sequence
WFRQAPGKEREFVA

SEQ ID NO: 750 - protein, 14 aa, Artificial
  FR2 sequence
WFRQAPGKEREFVA

SEQ ID NO: 751 - protein, 14 aa, Artificial
  FR2 sequence
WFRQAPGKEREFVA

SEQ ID NO: 752 - protein, 14 aa, Artificial
  FR2 sequence
WYRQAPGQQREWVA

SEQ ID NO: 753 - protein, 14 aa, Artificial
  FR2 sequence
WFRQAPGKEREFVA

SEQ ID NO: 754 - protein, 14 aa, Artificial
  FR2 sequence
WFRQASGKEREGVS

SEQ ID NO: 755 - protein, 14 aa, Artificial
  FR2 sequence
WVRQAPGKGLEWVS

SEQ ID NO: 756 - protein, 14 aa, Artificial
  FR2 sequence
WFRQAPGKEREFVA

SEQ ID NO: 757 - protein, 14 aa, Artificial
  FR2 sequence
WYRQAPGKQRDWVA

SEQ ID NO: 758 - protein, 14 aa, Artificial
  FR2 sequence
WYRQAPGKQRDWVA

SEQ ID NO: 759 - protein, 14 aa, Artificial
  FR2 sequence
WYRQAPGKQRDWVA

SEQ ID NO: 760 - protein, 14 aa, Artificial
  FR2 sequence
WYRQAPGKQRDWVA

SEQ ID NO: 761 - protein, 14 aa, Artificial
  FR2 sequence
WYRQAQGKQRDWVA

SEQ ID NO: 762 - protein, 14 aa, Artificial
  FR2 sequence
WYRQAPGKPRDWVA

SEQ ID NO: 763 - protein, 14 aa, Artificial
  FR2 sequence
WYRQPPGNERDWVA

SEQ ID NO: 764 - protein, 14 aa, Artificial
  FR2 sequence
WYRQTPGKSRDWVA

SEQ ID NO: 765 - protein, 14 aa, Artificial
  FR2 sequence
WYRQTPGNQRDWLA

SEQ ID NO: 766 - protein, 14 aa, Artificial
  FR2 sequence
WYRQAPGKQRDWVA

SEQ ID NO: 767 - protein, 14 aa, Artificial
  FR2 sequence
WYRQTPGNQRDWLA

SEQ ID NO: 768 - protein, 14 aa, Artificial
  FR2 sequence
WYRQTPGNQRDWLA

SEQ ID NO: 769 - protein, 14 aa, Artificial
  FR2 sequence
WYRQAPGKTRDWVA

SEQ ID NO: 770 - protein, 14 aa, Artificial
  FR2 sequence
WYRQGPGKQRELVA

SEQ ID NO: 771 - protein, 14 aa, Artificial
  FR2 sequence
WYRQAPGQQREWVA

SEQ ID NO: 772 - protein, 14 aa, Artificial
  FR2 sequence
WYRQAPGQQREWVA

SEQ ID NO: 773 - protein, 14 aa, Artificial
  FR2 sequence
WYRQAPGKQRDWVA

SEQ ID NO: 774 - protein, 14 aa, Artificial
  FR2 sequence
WYRQAPGKQRDWVA

SEQ ID NO: 775 - protein, 14 aa, Artificial
  FR2 sequence
WYRQPPGKQRDWVG

SEQ ID NO: 776 - protein, 14 aa, Artificial
  FR2 sequence
WYRQAPGKQRDWVA

SEQ ID NO: 777 - protein, 14 aa, Artificial
  FR2 sequence
WYRQAPGKQRDWVA

SEQ ID NO: 778 - protein, 14 aa, Artificial
  FR2 sequence
WYRQAPGKQRDWVA

SEQ ID NO: 779 - protein, 14 aa, Artificial
  FR2 sequence
WYRQAPGKQRDWVA

SEQ ID NO: 780 - protein, 14 aa, Artificial
  FR2 sequence
WYRQAPGRQRDWVA

SEQ ID NO: 781 - protein, 14 aa, Artificial
  FR2 sequence
WYRQAPGRQRDWVA

SEQ ID NO: 782 - protein, 14 aa, Artificial
  FR2 sequence
WYRQAPGKQRDWGA

SEQ ID NO: 783 - protein, 14 aa, Artificial
  FR2 sequence
WYRQAPGKQRDWVA

SEQ ID NO: 784 - protein, 14 aa, Artificial
  FR2 sequence
WYRQAPGKQRDWVA

SEQ ID NO: 785 - protein, 14 aa, Artificial
  FR2 sequence
WYRQAPGKQRDWVA

SEQ ID NO: 786 - protein, 14 aa, Artificial
  FR2 sequence
WYRQAPGRQRDWVA

SEQ ID NO: 787 - protein, 14 aa, Artificial
  FR2 sequence
WYRQAPGRQRDWVA

SEQ ID NO: 788 - protein, 14 aa, Artificial
  FR2 sequence
WYRQAPGRQRDWVA

SEQ ID NO: 789 - protein, 14 aa, Artificial
  FR2 sequence
WFRQAPGKERECVA

SEQ ID NO: 790 - protein, 14 aa, Artificial
  FR2 sequence
WFRQAPGKERECVA

SEQ ID NO: 791 - protein, 14 aa, Artificial
  FR2 sequence
WYRQAPGKQREFVA

SEQ ID NO: 792 - protein, 14 aa, Artificial
  FR2 sequence
WYRQAPGRQRDWVA

SEQ ID NO: 793 - protein, 14 aa, Artificial
  FR2 sequence
WFRQAPGKEREEVS

SEQ ID NO: 794 - protein, 14 aa, Artificial
  FR2 sequence
WYRQAPEKQRELVA

SEQ ID NO: 795 - protein, 14 aa, Artificial
  FR2 sequence
WYRQTPGKQREFVA

SEQ ID NO: 796 - protein, 14 aa, Artificial
  FR2 sequence
WYRQTPGKQREFVA

SEQ ID NO: 797 - protein, 14 aa, Artificial
  FR2 sequence
WYRQTPGKQREFVA

SEQ ID NO: 798 - protein, 14 aa, Artificial
  FR2 sequence
WYRQTPGKQREFVA

SEQ ID NO: 799 - protein, 14 aa, Artificial
  FR2 sequence
WYRQTPGNQREFVA

SEQ ID NO: 800 - protein, 14 aa, Artificial
  FR2 sequence
WYRQPPGNQREWVA

SEQ ID NO: 801 - protein, 14 aa, Artificial
  FR2 sequence
WYRQAPGEQREWVA

SEQ ID NO: 802 - protein, 14 aa, Artificial
  FR2 sequence
WYRQAPGKQRDWVA

SEQ ID NO: 803 - protein, 14 aa, Artificial
  FR2 sequence
WYRQAPGKQRDWVA

SEQ ID NO: 804 - protein, 14 aa, Artificial
  FR2 sequence
WYRQAPGKQRDWVA

SEQ ID NO: 805 - protein, 14 aa, Artificial
  FR2 sequence
WYRQAPGNQRDWVA

SEQ ID NO: 806 - protein, 14 aa, Artificial
  FR2 sequence
WYRQAPGKQRDWVA

SEQ ID NO: 807 - protein, 14 aa, Artificial
  FR2 sequence
WYRQAPGKQRDWVA

SEQ ID NO: 808 - protein, 14 aa, Artificial
  FR2 sequence
WVRQAPGKGLEWVS

SEQ ID NO: 809 - protein, 14 aa, Artificial
  FR2 sequence
WYRQAPGKQRDLVA

SEQ ID NO: 810 - protein, 14 aa, Artificial
  FR2 sequence
WYRQAPGKQRDLVA

SEQ ID NO: 811 - protein, 14 aa, Artificial
  FR2 sequence
WYRQAPGKQRELVA

SEQ ID NO: 812 - protein, 14 aa, Artificial
  FR2 sequence
WYRQAPGKERELVA

SEQ ID NO: 813 - protein, 14 aa, Artificial
  FR2 sequence
WYRQFPGKERELVA

SEQ ID NO: 814 - protein, 14 aa, Artificial
  FR2 sequence
WYRQAPGNERILVA

SEQ ID NO: 815 - protein, 14 aa, Artificial
  FR2 sequence
WYRQAPGKQRELVT

SEQ ID NO: 816 - protein, 14 aa, Artificial
  FR2 sequence
WFRQAPGDGREFVA

SEQ ID NO: 817 - protein, 14 aa, Artificial
  FR2 sequence
WVRQATGKGLEWVS

SEQ ID NO: 818 - protein, 14 aa, Artificial
  FR2 sequence
WVRQAPGKGLEWVS

SEQ ID NO: 819 - protein, 14 aa, Artificial
  FR2 sequence
WYRQSPGKQRELVA

SEQ ID NO: 820 - protein, 14 aa, Artificial
  FR2 sequence
WYRQAPGKQRELVA

SEQ ID NO: 821 - protein, 14 aa, Artificial
  FR2 sequence
WYRQAPGKQRELVA

SEQ ID NO: 822 - protein, 14 aa, Artificial
  FR2 sequence
WVRQAPGKGLEWVS

SEQ ID NO: 823 - protein, 14 aa, Artificial
  FR2 sequence
WVRQAPGKGLEWVS

SEQ ID NO: 824 - protein, 14 aa, Artificial
  FR2 sequence
WFRQAPGKEREGVS

SEQ ID NO: 825 - protein, 14 aa, Artificial
  FR2 sequence
WVRQAPGKGLEWVS

SEQ ID NO: 826 - protein, 14 aa, Artificial
  FR2 sequence
WYRQPPGNQREWVA

SEQ ID NO: 827 - protein, 14 aa, Artificial
  FR2 sequence
WYRQPPGNQREWVA

SEQ ID NO: 828 - protein, 14 aa, Artificial
  FR2 sequence
WYRQPPGNQREWVA

SEQ ID NO: 829 - protein, 14 aa, Artificial
  FR2 sequence
WYRQPPGNQREWVA

SEQ ID NO: 830 - protein, 14 aa, Artificial
  FR2 sequence
WFRQAPGKEREFVA

SEQ ID NO: 831 - protein, 14 aa, Artificial
  FR2 sequence
WVRQAPGKGPEWVS

SEQ ID NO: 832 - protein, 14 aa, Artificial
  FR2 sequence
WFRQAPGKEREFVA

SEQ ID NO: 833 - protein, 14 aa, Artificial
  FR2 sequence
WFRQAPGTEREFIA

SEQ ID NO: 834 - protein, 14 aa, Artificial
  FR2 sequence
WFRQAPGTEREFIA

SEQ ID NO: 835 - protein, 14 aa, Artificial
  FR2 sequence
WFRQAPGKEREFVG

SEQ ID NO: 836 - protein, 14 aa, Artificial
  FR2 sequence
WFRQAPGKERAFVA

SEQ ID NO: 837 - protein, 14 aa, Artificial
  FR2 sequence
WFRQAPGKEREFVA

SEQ ID NO: 838 - protein, 14 aa, Artificial
  FR2 sequence
WFRQAPGKEREFVA

SEQ ID NO: 839 - protein, 14 aa, Artificial
  FR2 sequence
WFRQAPGKEREFVA

SEQ ID NO: 840 - protein, 14 aa, Artificial
  FR2 sequence
WFRQAPGKEREFVA

SEQ ID NO: 841 - protein, 14 aa, Artificial
  FR2 sequence
WYRQAPGKQRELAA

SEQ ID NO: 842 - protein, 14 aa, Artificial
  FR2 sequence
WFRQAPGKEREFVA

SEQ ID NO: 843 - protein, 14 aa, Artificial
  FR2 sequence
WFRQAPGKERDFVA

SEQ ID NO: 844 - protein, 14 aa, Artificial
  FR2 sequence
WFRQTPGKEREFVA

SEQ ID NO: 845 - protein, 14 aa, Artificial
  FR2 sequence
WYRQRPGKPREWVG

SEQ ID NO: 846 - protein, 14 aa, Artificial
  FR2 sequence
WFRQAPGKEREFVA

SEQ ID NO: 847 - protein, 14 aa, Artificial
  FR2 sequence
WFRQAPGKERELIA

SEQ ID NO: 848 - protein, 14 aa, Artificial
  FR2 sequence
WFRQAPGKEREFVA

SEQ ID NO: 849 - protein, 14 aa, Artificial
  FR2 sequence
WFRQAPGKERDFVA

SEQ ID NO: 850 - protein, 14 aa, Artificial
  FR2 sequence
WFRQAPGKEREFVT

SEQ ID NO: 851 - protein, 14 aa, Artificial
  FR2 sequence
WYRQAPGKQREFVA

SEQ ID NO: 852 - protein, 14 aa, Artificial
  FR2 sequence
WYRQAPGKQRERVA

SEQ ID NO: 853 - protein, 14 aa, Artificial
  FR2 sequence
WFRRAPGKEREFVA

SEQ ID NO: 854 - protein, 14 aa, Artificial
  FR2 sequence
WFRQAPEKEREFVA

SEQ ID NO: 855 - protein, 14 aa, Artificial
  FR2 sequence
WFRQAPGKEREFVA

SEQ ID NO: 856 - protein, 14 aa, Artificial
  FR2 sequence
WFRQAPGKEREFVA

SEQ ID NO: 857 - protein, 14 aa, Artificial
  FR2 sequence
WFRQAPGKEREFVA

SEQ ID NO: 858 - protein, 14 aa, Artificial
  FR2 sequence
WFRQAPGKEREFVA

SEQ ID NO: 859 - protein, 14 aa, Artificial
  FR2 sequence
WFRQAPGNERELVS

SEQ ID NO: 860 - protein, 14 aa, Artificial
  FR2 sequence
WFRQAPGKEREFVA

SEQ ID NO: 861 - protein, 14 aa, Artificial
  FR2 sequence
WFRQAPGKDREFVS

SEQ ID NO: 862 - protein, 14 aa, Artificial
  FR2 sequence
WFRQAPGKEREFVA

SEQ ID NO: 863 - protein, 14 aa, Artificial
  FR2 sequence
WFRQAPGKERDFVA

SEQ ID NO: 864 - protein, 14 aa, Artificial
  FR2 sequence
WFRQAPGKEREFVA

SEQ ID NO: 865 - protein, 14 aa, Artificial
  FR2 sequence
WFRQAPGKEREFVA

SEQ ID NO: 866 - protein, 14 aa, Artificial
  FR2 sequence
WFRQAPGKEREFVA

SEQ ID NO: 867 - protein, 14 aa, Artificial
  FR2 sequence
WFRQAPGKEREFVA

SEQ ID NO: 868 - protein, 14 aa, Artificial
  FR2 sequence
WFRQAPGKEREFVA

SEQ ID NO: 869 - protein, 14 aa, Artificial
  FR2 sequence
WFRQAPGTEREFVA

SEQ ID NO: 870 - protein, 14 aa, Artificial
  FR2 sequence
WFRQAPGKEREFVA

SEQ ID NO: 871 - protein, 14 aa, Artificial
  FR2 sequence
WVRQAPGKGLEWVS

SEQ ID NO: 872 - protein, 14 aa, Artificial
  FR2 sequence
WFRQSPGEEREFLA

SEQ ID NO: 873 - protein, 14 aa, Artificial
  FR2 sequence
WFRQAPGKEREFVA

SEQ ID NO: 874 - protein, 14 aa, Artificial
  FR2 sequence
WFRQAPGKAREFVA

SEQ ID NO: 875 - protein, 14 aa, Artificial
  FR2 sequence
WFRQTPGKEREFVA

SEQ ID NO: 876 - protein, 14 aa, Artificial
  FR2 sequence
WFRQAPGKEREFVS

SEQ ID NO: 877 - protein, 14 aa, Artificial
  FR2 sequence
WFRQAPGKEREFVA

SEQ ID NO: 878 - protein, 14 aa, Artificial
  FR2 sequence
WFRQAPGKEREFVT

SEQ ID NO: 879 - protein, 14 aa, Artificial
  FR2 sequence
WFRQAPGKGRESVA

SEQ ID NO: 880 - protein, 14 aa, Artificial
  FR2 sequence
WFRQAPGKERESVA

SEQ ID NO: 881 - protein, 14 aa, Artificial
  FR2 sequence
WFRQAPGKEREFVA

SEQ ID NO: 882 - protein, 14 aa, Artificial
  FR2 sequence
WFRQAPGKERESVA

SEQ ID NO: 883 - protein, 14 aa, Artificial
  FR2 sequence
WFRQAPGNEREFVA

SEQ ID NO: 884 - protein, 14 aa, Artificial
  FR2 sequence
WYRPAPGKQRELVA

SEQ ID NO: 885 - protein, 14 aa, Artificial
  FR2 sequence
WFRQAPGKEREFVV

SEQ ID NO: 886 - protein, 14 aa, Artificial
  FR2 sequence
WYRQAPGKQRELVA

SEQ ID NO: 887 - protein, 14 aa, Artificial
  FR2 sequence
WFRQAPGKEREFVA

SEQ ID NO: 888 - protein, 14 aa, Artificial
  FR2 sequence
WFRQAPGKEREFVA

SEQ ID NO: 889 - protein, 14 aa, Artificial
  FR2 sequence
WYRLAPGNQRELVA

SEQ ID NO: 890 - protein, 14 aa, Artificial
  FR2 sequence
WYRQAPGNQREFVA

SEQ ID NO: 891 - protein, 14 aa, Artificial
  FR2 sequence
WYRQAPGKQREFVA

SEQ ID NO: 892 - protein, 14 aa, Artificial
  FR2 sequence
WYRQAPGEQRELVA

SEQ ID NO: 893 - protein, 14 aa, Artificial
  FR2 sequence
WYRQGPGKEREFVA

SEQ ID NO: 894 - protein, 14 aa, Artificial
  FR2 sequence
WFRQAPGKEREFVA

SEQ ID NO: 895 - protein, 14 aa, Artificial
  FR2 sequence
WFRQAPGEEREFVT

SEQ ID NO: 896 - protein, 14 aa, Artificial
  FR2 sequence
WFRQAPGKEREFRE

SEQ ID NO: 897 - protein, 14 aa, Artificial
  FR2 sequence
WFRQAPGTERELVA

SEQ ID NO: 898 - protein, 14 aa, Artificial
  FR2 sequence
WYRQAPGNQRELVA

SEQ ID NO: 899 - protein, 14 aa, Artificial
  FR2 sequence
WFRQAPGKEREFVS

SEQ ID NO: 900 - protein, 14 aa, Artificial
  FR2 sequence
WVRQAPGKAREFVA

SEQ ID NO: 901 - protein, 14 aa, Artificial
  FR2 sequence
WVRQAPGKAREFVA

SEQ ID NO: 902 - protein, 14 aa, Artificial
  FR2 sequence
WFRQALGQGREFVA

SEQ ID NO: 903 - protein, 14 aa, Artificial
  FR2 sequence
WFRQAPGKERESVA

SEQ ID NO: 904 - protein, 14 aa, Artificial
  FR2 sequence
WFRQAPGKEREFVA

SEQ ID NO: 905 - protein, 14 aa, Artificial
  FR2 sequence
WFRQAPGKEREFVA

SEQ ID NO: 906 - protein, 14 aa, Artificial
  FR2 sequence
WYRQGPGQQLELVA

SEQ ID NO: 907 - protein, 14 aa, Artificial
  FR2 sequence
WFRQAPGKEREFVA

SEQ ID NO: 908 - protein, 14 aa, Artificial
  FR2 sequence
WFRQAPGKEREFVG

SEQ ID NO: 909 - protein, 14 aa, Artificial
  FR2 sequence
WYRQAPGKQREFVA

SEQ ID NO: 910 - protein, 14 aa, Artificial
  FR2 sequence
WYRQAPGNQRDLVA

SEQ ID NO: 911 - protein, 14 aa, Artificial
  FR2 sequence
WFRQAPGKEREFVS

SEQ ID NO: 912 - protein, 14 aa, Artificial
  FR2 sequence
WFRQAPGKEREFVA

SEQ ID NO: 913 - protein, 14 aa, Artificial
  FR2 sequence
WFRQAPEKEREAVS

SEQ ID NO: 914 - protein, 14 aa, Artificial
  FR2 sequence
WFRQAPGKGREFVA

SEQ ID NO: 915 - protein, 14 aa, Artificial
  FR2 sequence
WFRQAPGKEREFVA

SEQ ID NO: 916 - protein, 14 aa, Artificial
  FR2 sequence
WLRQAPGKEREFVA

SEQ ID NO: 917 - protein, 14 aa, Artificial
  FR2 sequence
WFRQAPGKVREFVA

SEQ ID NO: 918 - protein, 14 aa, Artificial
  FR2 sequence
WFRQAPGKVREFVA

SEQ ID NO: 919 - protein, 14 aa, Artificial
  FR2 sequence
WFRQGPGKRRELVA

SEQ ID NO: 920 - protein, 14 aa, Artificial
  FR2 sequence
WFRQSPGKERESVA

SEQ ID NO: 921 - protein, 14 aa, Artificial
  FR2 sequence
WFRQGPGKEREFAA

SEQ ID NO: 922 - protein, 14 aa, Artificial
  FR2 sequence
WFRQAPGKEREFIA

SEQ ID NO: 923 - protein, 14 aa, Artificial
  FR2 sequence
WFRQAPRKEREFVA

SEQ ID NO: 924 - protein, 14 aa, Artificial
  FR2 sequence
WFRQAPGSERDFVA

SEQ ID NO: 925 - protein, 14 aa, Artificial
  FR2 sequence
WSREAPGKRRELVA

SEQ ID NO: 926 - protein, 14 aa, Artificial
  FR2 sequence
WFRQAPGKEREFVA

SEQ ID NO: 927 - protein, 14 aa, Artificial
  FR2 sequence
WFRQAPGKEREFVA

SEQ ID NO: 928 - protein, 14 aa, Artificial
  FR2 sequence
WFRQAPGKEREFVA

SEQ ID NO: 929 - protein, 14 aa, Artificial
  FR2 sequence
WYRQAPGNQRELVA

SEQ ID NO: 930 - protein, 14 aa, Artificial
  FR2 sequence
WFRQAPGKEREFVA

SEQ ID NO: 931 - protein, 14 aa, Artificial
  FR2 sequence
WFRQAPGKAREFVA

SEQ ID NO: 932 - protein, 14 aa, Artificial
  FR2 sequence
WFRQAPGKERGFVA

SEQ ID NO: 933 - protein, 14 aa, Artificial
  FR2 sequence
WFRQAPGKEREVVA

SEQ ID NO: 934 - protein, 14 aa, Artificial
  FR2 sequence
WYRKAPGKQREVVA

SEQ ID NO: 935 - protein, 14 aa, Artificial
  FR2 sequence
WYRQAPGNQRELVA

SEQ ID NO: 936 - protein, 14 aa, Artificial
  FR2 sequence
WFRQAPGKEREFVS

SEQ ID NO: 937 - protein, 14 aa, Artificial
  FR2 sequence
WFRQAPGKEREFVA

SEQ ID NO: 938 - protein, 14 aa, Artificial
  FR2 sequence
WFRQSPGKEREFVG

SEQ ID NO: 939 - protein, 14 aa, Artificial
  FR2 sequence
WFRQAPGKAREFVA

SEQ ID NO: 940 - protein, 14 aa, Artificial
  FR2 sequence
WFRQAPGKEREFVA

SEQ ID NO: 941 - protein, 14 aa, Artificial
  FR2 sequence
WFRQAPGEEREFVA

SEQ ID NO: 942 - protein, 14 aa, Artificial
  FR2 sequence
WFRRAPGKEREHVA

SEQ ID NO: 943 - protein, 14 aa, Artificial
  FR2 sequence
WHRQVSGKERELVA

SEQ ID NO: 944 - protein, 14 aa, Artificial
  FR2 sequence
WHRQVPGKQRELVA

SEQ ID NO: 945 - protein, 14 aa, Artificial
  FR2 sequence
WHRQAPGKERELVS

SEQ ID NO: 946 - protein, 14 aa, Artificial
  FR2 sequence
WFRQAPGKEREGVS

SEQ ID NO: 947 - protein, 14 aa, Artificial
  FR2 sequence
WVRQAPGKGPERVS

SEQ ID NO: 948 - protein, 14 aa, Artificial
  FR2 sequence
WFRQGPGKEREFVA

SEQ ID NO: 949 - protein, 14 aa, Artificial
  FR2 sequence
WFRQAPGKAREGVS

SEQ ID NO: 950 - protein, 14 aa, Artificial
  FR2 sequence
WYRQAPGNERELVA

SEQ ID NO: 951 - protein, 17 aa, Artificial
  CDR2 sequence
SINWSGTHTDYADSVKG

SEQ ID NO: 952 - protein, 17 aa, Artificial
  CDR2 sequence
SINWSGTHTDYADSVKG

SEQ ID NO: 953 - protein, 17 aa, Artificial
  CDR2 sequence
SINWSGTHTDYTDPVKG

SEQ ID NO: 954 - protein, 17 aa, Artificial
  CDR2 sequence
SINWSGTHTDYADSVKG

SEQ ID NO: 955 - protein, 17 aa, Artificial
  CDR2 sequence
SINWSGTHTDYADSVKG

SEQ ID NO: 956 - protein, 17 aa, Artificial
  CDR2 sequence
SINWSGTHTDYADSVKG

SEQ ID NO: 957 - protein, 17 aa, Artificial
  CDR2 sequence
SINWSGTHTDYADSVKG

SEQ ID NO: 958 - protein, 16 aa, Artificial
  CDR2 sequence
SIDSSGGTNYADSVKG

SEQ ID NO: 959 - protein, 17 aa, Artificial
  CDR2 sequence
SINWSGTHTDYADSVKG

SEQ ID NO: 960 - protein, 17 aa, Artificial
  CDR2 sequence
SINWSGTHTDYADSVKG

SEQ ID NO: 961 - protein, 17 aa, Artificial
  CDR2 sequence
SINWSGTHTDYADSVKG

SEQ ID NO: 962 - protein, 17 aa, Artificial
  CDR2 sequence
SINWSGTHTDYADSVKG

SEQ ID NO: 963 - protein, 17 aa, Artificial
  CDR2 sequence
SINWSGTHTDYADSVKG

SEQ ID NO: 964 - protein, 17 aa, Artificial
  CDR2 sequence
SINWSGTHTDYADSVKG

SEQ ID NO: 965 - protein, 17 aa, Artificial
  CDR2 sequence
SINWSGTHTDYADSVKG

SEQ ID NO: 966 - protein, 17 aa, Artificial
  CDR2 sequence
SINWSGTHTDYADSVKG

SEQ ID NO: 967 - protein, 17 aa, Artificial
  CDR2 sequence
SINWSGTHTDYADSVKG

SEQ ID NO: 968 - protein, 17 aa, Artificial
  CDR2 sequence
SINWSGTHTDYADSVRG

SEQ ID NO: 969 - protein, 17 aa, Artificial
  CDR2 sequence
SINWSGTHTDYTDSVKG

SEQ ID NO: 970 - protein, 17 aa, Artificial
  CDR2 sequence
SINWNVTHTDYAYSVKG

SEQ ID NO: 971 - protein, 17 aa, Artificial
  CDR2 sequence
SINWSGTHTDCADSVKG

SEQ ID NO: 972 - protein, 17 aa, Artificial
  CDR2 sequence
SINWSGTHTDYADSVKG

SEQ ID NO: 973 - protein, 17 aa, Artificial
  CDR2 sequence
SINWSGTHTDYADSVKG

SEQ ID NO: 974 - protein, 17 aa, Artificial
  CDR2 sequence
SINWSGTHTDYADSVKG

SEQ ID NO: 975 - protein, 17 aa, Artificial
  CDR2 sequence
SINWSGTHTDYADSVKG

SEQ ID NO: 976 - protein, 17 aa, Artificial
  CDR2 sequence
SINWSGTHTDYADSVKG

SEQ ID NO: 977 - protein, 17 aa, Artificial
  CDR2 sequence
SINWSGTHTDYADSVKG

SEQ ID NO: 978 - protein, 17 aa, Artificial
  CDR2 sequence
SINWNGTHTDYAYSVKG

SEQ ID NO: 979 - protein, 17 aa, Artificial
  CDR2 sequence
SINWSGTHTDYADSVKG

SEQ ID NO: 980 - protein, 17 aa, Artificial
  CDR2 sequence
SINWSGTHTDYADSVKG

SEQ ID NO: 981 - protein, 17 aa, Artificial
  CDR2 sequence
SINWSGTHTDYADSVKG

SEQ ID NO: 982 - protein, 17 aa, Artificial
  CDR2 sequence
AINWSGSHRNYADSVKG

SEQ ID NO: 983 - protein, 17 aa, Artificial
  CDR2 sequence
AINWSGTHRNYADSVKG

SEQ ID NO: 984 - protein, 17 aa, Artificial
  CDR2 sequence
AINWSGSHRNYADSVKG

SEQ ID NO: 985 - protein, 17 aa, Artificial
  CDR2 sequence
SINWSGSHRNYADSVKG

SEQ ID NO: 986 - protein, 17 aa, Artificial
  CDR2 sequence
SINWSGTHKDYADSVKG

SEQ ID NO: 987 - protein, 17 aa, Artificial
  CDR2 sequence
SINWSGTHTDYADSVKG

SEQ ID NO: 988 - protein, 17 aa, Artificial
  CDR2 sequence
SINWSGTHTDYTDSVKG

SEQ ID NO: 989 - protein, 17 aa, Artificial
  CDR2 sequence
SINWSGTHTDYADSVKG

SEQ ID NO: 990 - protein, 17 aa, Artificial
  CDR2 sequence
SINWSGTHTDYADSVKG

SEQ ID NO: 991 - protein, 17 aa, Artificial
  CDR2 sequence
SINWSGTHTDYTDSVKG

SEQ ID NO: 992 - protein, 17 aa, Artificial
  CDR2 sequence
SINWSGTHTDYADSVKG

SEQ ID NO: 993 - protein, 17 aa, Artificial
  CDR2 sequence
SINWSGTHTDYADSVKG

SEQ ID NO: 994 - protein, 17 aa, Artificial
  CDR2 sequence
SINWSGTHTDYTDSVKG

SEQ ID NO: 995 - protein, 17 aa, Artificial
  CDR2 sequence
SINWSGTHTGYTDSVKG

SEQ ID NO: 996 - protein, 17 aa, Artificial
  CDR2 sequence
SINWSGTHTDYTDSVKG

SEQ ID NO: 997 - protein, 17 aa, Artificial
  CDR2 sequence
SINWSGTHTDYTGSVKG

SEQ ID NO: 998 - protein, 17 aa, Artificial
  CDR2 sequence
SINWSGTHTDYTDSVKG

SEQ ID NO: 999 - protein, 17 aa, Artificial
  CDR2 sequence
SINWSGTHTDYTDSVKG

SEQ ID NO: 1000 - protein, 17 aa, Artificial
  CDR2 sequence
SINWSGTHTGYTDSVKG

SEQ ID NO: 1001 - protein, 17 aa, Artificial
  CDR2 sequence
SINWSGTHTDYTDSVKG

SEQ ID NO: 1002 - protein, 17 aa, Artificial
  CDR2 sequence
SINWSGTHTDYTDSVKG

SEQ ID NO: 1003 - protein, 17 aa, Artificial
  CDR2 sequence
SINWSGTHTDYTDSVKG

SEQ ID NO: 1004 - protein, 17 aa, Artificial
  CDR2 sequence
SINWSGTHTDYTDSVKG

SEQ ID NO: 1005 - protein, 17 aa, Artificial
  CDR2 sequence
SINWSGTHTDCTDSVKG

SEQ ID NO: 1006 - protein, 17 aa, Artificial
  CDR2 sequence
SINWSGTHTDYADSVKG

SEQ ID NO: 1007 - protein, 17 aa, Artificial
  CDR2 sequence
SINWSGTHTDYTGSVKG

SEQ ID NO: 1008 - protein, 17 aa, Artificial
  CDR2 sequence
SINWSGTHTDYTDSVKG

SEQ ID NO: 1009 - protein, 17 aa, Artificial
  CDR2 sequence
SINWSGTHTDYTDSVKG

SEQ ID NO: 1010 - protein, 17 aa, Artificial
  CDR2 sequence
SINWSGTHTDYTDSVKG

SEQ ID NO: 1011 - protein, 17 aa, Artificial
  CDR2 sequence
SINWSGTHTDYADSVKG

SEQ ID NO: 1012 - protein, 16 aa, Artificial
  CDR2 sequence
LISSIGDTYYADSVKG

SEQ ID NO: 1013 - protein, 17 aa, Artificial
  CDR2 sequence
GIMWDGRSLFYADSVKG

SEQ ID NO: 1014 - protein, 16 aa, Artificial
  CDR2 sequence
LISRVGVTSSADSVKG

SEQ ID NO: 1015 - protein, 16 aa, Artificial
  CDR2 sequence
TINWSGVTAYADSVKG

SEQ ID NO: 1016 - protein, 16 aa, Artificial
  CDR2 sequence
TINWSGVTAYADSIKG

SEQ ID NO: 1017 - protein, 16 aa, Artificial
  CDR2 sequence
TINWSGVTAYADSIKG

SEQ ID NO: 1018 - protein, 16 aa, Artificial
  CDR2 sequence
TINWSGATAYADSIKG

SEQ ID NO: 1019 - protein, 16 aa, Artificial
  CDR2 sequence
TINWSGVTAYADSIKG

SEQ ID NO: 1020 - protein, 16 aa, Artificial
  CDR2 sequence
TINWSGVTAYADSVKG

SEQ ID NO: 1021 - protein, 16 aa, Artificial
  CDR2 sequence
TINWSGVNAYADSVKG

SEQ ID NO: 1022 - protein, 16 aa, Artificial
  CDR2 sequence
TINWSGVNAYADSVKG

SEQ ID NO: 1023 - protein, 16 aa, Artificial
  CDR2 sequence
TINWSGVTAYADSVKG

SEQ ID NO: 1024 - protein, 16 aa, Artificial
  CDR2 sequence
TINWSGVTAYADSVKG

SEQ ID NO: 1025 - protein, 16 aa, Artificial
  CDR2 sequence
TINWSGVTAYADSVKG

SEQ ID NO: 1026 - protein, 16 aa, Artificial
  CDR2 sequence
TINWSGVTAYADSVKG

SEQ ID NO: 1027 - protein, 16 aa, Artificial
  CDR2 sequence
AISGAGDINYADSVKG

SEQ ID NO: 1028 - protein, 17 aa, Artificial
  CDR2 sequence
TISWNYGYTYYSDSVKG

SEQ ID NO: 1029 - protein, 17 aa, Artificial
  CDR2 sequence
CITSSDGSTYYADSVKG

SEQ ID NO: 1030 - protein, 17 aa, Artificial
  CDR2 sequence
AVDSGGGRTDYAHSVKG

SEQ ID NO: 1031 - protein, 17 aa, Artificial
  CDR2 sequence
TISRGGSATYYADSLKG

SEQ ID NO: 1032 - protein, 16 aa, Artificial
  CDR2 sequence
TISSHGLPVYADSVKG

SEQ ID NO: 1033 - protein, 16 aa, Artificial
  CDR2 sequence
TIGTSGPPRYADSVKG

SEQ ID NO: 1034 - protein, 16 aa, Artificial
  CDR2 sequence
TISSHGLPVYADSVKG

SEQ ID NO: 1035 - protein, 16 aa, Artificial
  CDR2 sequence
TISARGMPAYEDSVKG

SEQ ID NO: 1036 - protein, 16 aa, Artificial
  CDR2 sequence
TISSHGLPVYADSVKG

SEQ ID NO: 1037 - protein, 15 aa, Artificial
  CDR2 sequence
TIRNGAPVYADSVKG

SEQ ID NO: 1038 - protein, 15 aa, Artificial
  CDR2 sequence
TIRSGAPVYADSVKG

SEQ ID NO: 1039 - protein, 15 aa, Artificial
  CDR2 sequence
TIRSGTPVYADSVKG

SEQ ID NO: 1040 - protein, 16 aa, Artificial
  CDR2 sequence
TIGSSGTPAYADSVKG

SEQ ID NO: 1041 - protein, 16 aa, Artificial
  CDR2 sequence
TIGTGGTPAYADSFKG

SEQ ID NO: 1042 - protein, 16 aa, Artificial
  CDR2 sequence
TIGSSGTPAYADSVKG

SEQ ID NO: 1043 - protein, 16 aa, Artificial
  CDR2 sequence
TIGSSGTPAYADSVKG

SEQ ID NO: 1044 - protein, 16 aa, Artificial
  CDR2 sequence
TIGTHGTPLYADSVKG

SEQ ID NO: 1045 - protein, 16 aa, Artificial
  CDR2 sequence
TVNDGGTTSYADSVKG

SEQ ID NO: 1046 - protein, 16 aa, Artificial
  CDR2 sequence
AISGAGDINYADSVKG

SEQ ID NO: 1047 - protein, 16 aa, Artificial
  CDR2 sequence
AISGAGDINYADSVKG

SEQ ID NO: 1048 - protein, 16 aa, Artificial
  CDR2 sequence
TIAGDGSTVYADSMKG

SEQ ID NO: 1049 - protein, 16 aa, Artificial
  CDR2 sequence
TIAGDGSTVYADSMKG

SEQ ID NO: 1050 - protein, 16 aa, Artificial
  CDR2 sequence
TISSDGTANYADSVKG

SEQ ID NO: 1051 - protein, 16 aa, Artificial
  CDR2 sequence
TSDSGGTTLYADSVKG

SEQ ID NO: 1052 - protein, 16 aa, Artificial
  CDR2 sequence
TSGTGYGATYDDSVKG

SEQ ID NO: 1053 - protein, 16 aa, Artificial
  CDR2 sequence
TIAGDGSTVYADSMKG

SEQ ID NO: 1054 - protein, 16 aa, Artificial
  CDR2 sequence
TIGSDGTTIYADSVKG

SEQ ID NO: 1055 - protein, 17 aa, Artificial
  CDR2 sequence
TIYSPSGSAVYADSVKG

SEQ ID NO: 1056 - protein, 17 aa, Artificial
  CDR2 sequence
TIYSRSGGAVYADSVKG

SEQ ID NO: 1057 - protein, 16 aa, Artificial
  CDR2 sequence
TTYSRGGTTYNDSAKG

SEQ ID NO: 1058 - protein, 16 aa, Artificial
  CDR2 sequence
SIGTRGAPVYADSVNG

SEQ ID NO: 1059 - protein, 16 aa, Artificial
  CDR2 sequence
TSDSGGTTLYADSVKG

SEQ ID NO: 1060 - protein, 16 aa, Artificial
  CDR2 sequence
TSDSGGTTLYADSVKG

SEQ ID NO: 1061 - protein, 17 aa, Artificial
  CDR2 sequence
TIYSPSGSAVYADSVKG

SEQ ID NO: 1062 - protein, 17 aa, Artificial
  CDR2 sequence
TIYSPSGSAVYADSVKG

SEQ ID NO: 1063 - protein, 17 aa, Artificial
  CDR2 sequence
TIYSPSGSAVYADSVKG

SEQ ID NO: 1064 - protein, 17 aa, Artificial
  CDR2 sequence
SLYLNGDYPYYADSVKG

SEQ ID NO: 1065 - protein, 17 aa, Artificial
  CDR2 sequence
SMYLDGDYPYYADSVKG

SEQ ID NO: 1066 - protein, 16 aa, Artificial
  CDR2 sequence
SITKFGSTNYADSVKG

SEQ ID NO: 1067 - protein, 16 aa, Artificial
  CDR2 sequence
TSSNTGGTTYDDSVKG

SEQ ID NO: 1068 - protein, 17 aa, Artificial
  CDR2 sequence
CIASSDGSTYYAESVKG

SEQ ID NO: 1069 - protein, 16 aa, Artificial
  CDR2 sequence
SVSGGGNSDYASSVKG

SEQ ID NO: 1070 - protein, 16 aa, Artificial
  CDR2 sequence
SMRGSGSTNYADSARG

SEQ ID NO: 1071 - protein, 16 aa, Artificial
  CDR2 sequence
SMRGSGSTNYADSVRG

SEQ ID NO: 1072 - protein, 16 aa, Artificial
  CDR2 sequence
SMRGSGSTNYADSARG

SEQ ID NO: 1073 - protein, 16 aa, Artificial
  CDR2 sequence
SMRGSGSTNYADSVRG

SEQ ID NO: 1074 - protein, 16 aa, Artificial
  CDR2 sequence
TIHSSGSTIYADSVRG

SEQ ID NO: 1075 - protein, 16 aa, Artificial
  CDR2 sequence
TIGSNGFATYPDSVKG

SEQ ID NO: 1076 - protein, 16 aa, Artificial
  CDR2 sequence
TISRQGMSTYPDSVKG

SEQ ID NO: 1077 - protein, 16 aa, Artificial
  CDR2 sequence
TIGSDGLANYADSVKG

SEQ ID NO: 1078 - protein, 16 aa, Artificial
  CDR2 sequence
TIGSSGHPVYTDSVKG

SEQ ID NO: 1079 - protein, 16 aa, Artificial
  CDR2 sequence
TIGSGGTTNYADSVKG

SEQ ID NO: 1080 - protein, 16 aa, Artificial
  CDR2 sequence
TIGSAGLASYADSVRG

SEQ ID NO: 1081 - protein, 16 aa, Artificial
  CDR2 sequence
TISSAGGTAYADAVKG

SEQ ID NO: 1082 - protein, 16 aa, Artificial
  CDR2 sequence
TIAGDGSTVYADSMKG

SEQ ID NO: 1083 - protein, 16 aa, Artificial
  CDR2 sequence
GVGGDGVGSYADSVKG

SEQ ID NO: 1084 - protein, 16 aa, Artificial
  CDR2 sequence
SIDASGGTNYADSVKG

SEQ ID NO: 1085 - protein, 16 aa, Artificial
  CDR2 sequence
SIDSSGGTNYADSVKG

SEQ ID NO: 1086 - protein, 16 aa, Artificial
  CDR2 sequence
SINSDGSTGYTDSVKG

SEQ ID NO: 1087 - protein, 16 aa, Artificial
  CDR2 sequence
EISSADEPSFADAVKG

SEQ ID NO: 1088 - protein, 16 aa, Artificial
  CDR2 sequence
TILSEGDTNYVDPVKG

SEQ ID NO: 1089 - protein, 16 aa, Artificial
  CDR2 sequence
IISNGGTTSYRDSVKG

SEQ ID NO: 1090 - protein, 16 aa, Artificial
  CDR2 sequence
YITINGIANYVDSVKG

SEQ ID NO: 1091 - protein, 16 aa, Artificial
  CDR2 sequence
HIFRSGITSYASSVKG

SEQ ID NO: 1092 - protein, 17 aa, Artificial
  CDR2 sequence
GISWNGGSTNYADSVKG

SEQ ID NO: 1093 - protein, 17 aa, Artificial
  CDR2 sequence
AIKPDGSITYYADSVKG

SEQ ID NO: 1094 - protein, 16 aa, Artificial
  CDR2 sequence
AVDNDDNTEYSDSVAG

SEQ ID NO: 1095 - protein, 16 aa, Artificial
  CDR2 sequence
AIDDGGNTEYSDFVNG

SEQ ID NO: 1096 - protein, 16 aa, Artificial
  CDR2 sequence
TIAHDGSTNYANSVKG

SEQ ID NO: 1097 - protein, 18 aa, Artificial
  CDR2 sequence
AISSGGGSITTYADSVKG

SEQ ID NO: 1098 - protein, 18 aa, Artificial
  CDR2 sequence
AISSGGGSITTYADSVKG

SEQ ID NO: 1099 - protein, 17 aa, Artificial
  CDR2 sequence
CISSSDGSTYYADSVKG

SEQ ID NO: 1100 - protein, 17 aa, Artificial
  CDR2 sequence
SINWSGTHTDYAEDMKG

SEQ ID NO: 1101 - protein, 16 aa, Artificial
  CDR2 sequence
TIGSNGFATYPDSVKG

SEQ ID NO: 1102 - protein, 16 aa, Artificial
  CDR2 sequence
TIGSNGFATYPDSVKG

SEQ ID NO: 1103 - protein, 16 aa, Artificial
  CDR2 sequence
TIGSNGFATYPDSVKG

SEQ ID NO: 1104 - protein, 16 aa, Artificial
  CDR2 sequence
TIGSNGFATYPDSVKG

SEQ ID NO: 1105 - protein, 17 aa, Artificial
  CDR2 sequence
AIGSGDIITYYADSVKG

SEQ ID NO: 1106 - protein, 17 aa, Artificial
  CDR2 sequence
AINSGGGSTYYADSVKG

SEQ ID NO: 1107 - protein, 17 aa, Artificial
  CDR2 sequence
AISRSPGVTYYADSVKG

SEQ ID NO: 1108 - protein, 17 aa, Artificial
  CDR2 sequence
GIRWSDGSTYYADSVKG

SEQ ID NO: 1109 - protein, 17 aa, Artificial
  CDR2 sequence
GIRWSDGSTYYADSVKG

SEQ ID NO: 1110 - protein, 17 aa, Artificial
  CDR2 sequence
GIRWSDGSTYYADSVKG

SEQ ID NO: 1111 - protein, 17 aa, Artificial
  CDR2 sequence
AIRWSGGNTYYADSVKG

SEQ ID NO: 1112 - protein, 18 aa, Artificial
  CDR2 sequence
AINWRSGGSTYYADSVKG

SEQ ID NO: 1113 - protein, 17 aa, Artificial
  CDR2 sequence
AVRWSDDYTYYADSVKG

SEQ ID NO: 1114 - protein, 17 aa, Artificial
  CDR2 sequence
GINKSGGITHSADSVKG

SEQ ID NO: 1115 - protein, 17 aa, Artificial
  CDR2 sequence
NIKWSGDRIVYADSVKG

SEQ ID NO: 1116 - protein, 16 aa, Artificial
  CDR2 sequence
VIISSGTTTYADSVKG

SEQ ID NO: 1117 - protein, 17 aa, Artificial
  CDR2 sequence
AITDNGGSTYYADSVKG

SEQ ID NO: 1118 - protein, 16 aa, Artificial
  CDR2 sequence
AITSSGSTNYADSVKG

SEQ ID NO: 1119 - protein, 16 aa, Artificial
  CDR2 sequence
AITSSGSTNYADSVKG

SEQ ID NO: 1120 - protein, 16 aa, Artificial
  CDR2 sequence
TINSGGDTNYAGSVKG

SEQ ID NO: 1121 - protein, 17 aa, Artificial
  CDR2 sequence
AISSSGISTIYGDSVKG

SEQ ID NO: 1122 - protein, 17 aa, Artificial
  CDR2 sequence
HITWNGGSTYYADSVKG

SEQ ID NO: 1123 - protein, 18 aa, Artificial
  CDR2 sequence
AISGWSGGTTNYADSVKG

SEQ ID NO: 1124 - protein, 17 aa, Artificial
  CDR2 sequence
AISWNGVTIYYADSVKG

SEQ ID NO: 1125 - protein, 15 aa, Artificial
  CDR2 sequence
VISGVGTSYADSVKG

SEQ ID NO: 1126 - protein, 16 aa, Artificial
  CDR2 sequence
SISSGSAINYADSVKG

SEQ ID NO: 1127 - protein, 16 aa, Artificial
  CDR2 sequence
TLTSAGNTNYADSVKG

SEQ ID NO: 1128 - protein, 17 aa, Artificial
  CDR2 sequence
GIAWNGASIGSADSVRG

SEQ ID NO: 1129 - protein, 17 aa, Artificial
  CDR2 sequence
GITMSGFNTRYADSVKG

SEQ ID NO: 1130 - protein, 17 aa, Artificial
  CDR2 sequence
GISWSGGHTFYADSVKG

SEQ ID NO: 1131 - protein, 17 aa, Artificial
  CDR2 sequence
TIDWSGDTAFYADSVKG

SEQ ID NO: 1132 - protein, 17 aa, Artificial
  CDR2 sequence
AVSWDGRNTYYADSVKG

SEQ ID NO: 1133 - protein, 16 aa, Artificial
  CDR2 sequence
RVSWIRTTYYSDSVKG

SEQ ID NO: 1134 - protein, 17 aa, Artificial
  CDR2 sequence
AIGWSGASTYYIDSVEG

SEQ ID NO: 1135 - protein, 17 aa, Artificial
  CDR2 sequence
AIRWSGGTTFYGDSVKG

SEQ ID NO: 1136 - protein, 17 aa, Artificial
  CDR2 sequence
AITWNGTRTYYRDSVKG

SEQ ID NO: 1137 - protein, 17 aa, Artificial
  CDR2 sequence
AIRWSGGSAFYADSVKG

SEQ ID NO: 1138 - protein, 16 aa, Artificial
  CDR2 sequence
AITSSGSTNYADSVKG

SEQ ID NO: 1139 - protein, 16 aa, Artificial
  CDR2 sequence
AIRSSGGLFYALSVSG

SEQ ID NO: 1140 - protein, 16 aa, Artificial
  CDR2 sequence
AIRSGGTTLYEDSVKG

SEQ ID NO: 1141 - protein, 16 aa, Artificial
  CDR2 sequence
VIRSGGTTLYADSVKG

SEQ ID NO: 1142 - protein, 16 aa, Artificial
  CDR2 sequence
AIRSGGTTLYEDSVKG

SEQ ID NO: 1143 - protein, 16 aa, Artificial
  CDR2 sequence
AIRSGATTLYEDSVKG

SEQ ID NO: 1144 - protein, 16 aa, Artificial
  CDR2 sequence
VIRSGGTTLYEDSVKG

SEQ ID NO: 1145 - protein, 16 aa, Artificial
  CDR2 sequence
VTRSGGTTFYADSAKG

SEQ ID NO: 1146 - protein, 17 aa, Artificial
  CDR2 sequence
AINSGGGSTSYADSVKG

SEQ ID NO: 1147 - protein, 17 aa, Artificial
  CDR2 sequence
LITRNGETKKTADSVKG

SEQ ID NO: 1148 - protein, 17 aa, Artificial
  CDR2 sequence
AIRWSGGITYYADSVKG

SEQ ID NO: 1149 - protein, 17 aa, Artificial
  CDR2 sequence
AISRSGTGTYYAGSMKG

SEQ ID NO: 1150 - protein, 17 aa, Artificial
  CDR2 sequence
RVWWNGGSAYYADSVKG

SEQ ID NO: 1151 - protein, 17 aa, Artificial
  CDR2 sequence
AISPIGSSKYYADSVKG

SEQ ID NO: 1152 - protein, 17 aa, Artificial
  CDR2 sequence
AISTSGGGTDSADSVKG

SEQ ID NO: 1153 - protein, 17 aa, Artificial
  CDR2 sequence
AITWSGDSTNFADSVKG

SEQ ID NO: 1154 - protein, 16 aa, Artificial
  CDR2 sequence
TIFVGGTTYYSDSVKG

SEQ ID NO: 1155 - protein, 16 aa, Artificial
  CDR2 sequence
TIFVGGTTYYSDSVKG

SEQ ID NO: 1156 - protein, 17 aa, Artificial
  CDR2 sequence
AKTWSGASTYYADSVRG

SEQ ID NO: 1157 - protein, 16 aa, Artificial
  CDR2 sequence
TIFVGGTTYYSDSVKG

SEQ ID NO: 1158 - protein, 17 aa, Artificial
  CDR2 sequence
AITWNGASTSYADSVKG

SEQ ID NO: 1159 - protein, 16 aa, Artificial
  CDR2 sequence
RITSTGSTNYADSVKG

SEQ ID NO: 1160 - protein, 17 aa, Artificial
  CDR2 sequence
AIKSSDNSTSYRDSVKG

SEQ ID NO: 1161 - protein, 16 aa, Artificial
  CDR2 sequence
AVTSGGITNYADSVKG

SEQ ID NO: 1162 - protein, 17 aa, Artificial
  CDR2 sequence
ASRWSGGIKYHADSVKG

SEQ ID NO: 1163 - protein, 17 aa, Artificial
  CDR2 sequence
AIRWSGSATDYSDSVKG

SEQ ID NO: 1164 - protein, 16 aa, Artificial
  CDR2 sequence
TITADGITNYADSVKG

SEQ ID NO: 1165 - protein, 16 aa, Artificial
  CDR2 sequence
AVTEGGTTSYAASVKG

SEQ ID NO: 1166 - protein, 16 aa, Artificial
  CDR2 sequence
AVTEDGSINYAESVKG

SEQ ID NO: 1167 - protein, 16 aa, Artificial
  CDR2 sequence
EITEGGIINYTDSVKG

SEQ ID NO: 1168 - protein, 16 aa, Artificial
  CDR2 sequence
LINVGGVAKYEDSVKG

SEQ ID NO: 1169 - protein, 17 aa, Artificial
  CDR2 sequence
AVSWSGGNTYYADSVKG

SEQ ID NO: 1170 - protein, 17 aa, Artificial
  CDR2 sequence
GISWSGGSTDYADSVKG

SEQ ID NO: 1171 - protein, 20 aa, Artificial
  CDR2 sequence
FVAATSWSGGSKYVADSVTG

SEQ ID NO: 1172 - protein, 17 aa, Artificial
  CDR2 sequence
ATGRRGGPTYYADSVKG

SEQ ID NO: 1173 - protein, 16 aa, Artificial
  CDR2 sequence
TITGSTGTTYADSVKG

SEQ ID NO: 1174 - protein, 17 aa, Artificial
  CDR2 sequence
AINWSGSHTDYGDSVKG

SEQ ID NO: 1175 - protein, 17 aa, Artificial
  CDR2 sequence
GITRNSGRTRYADSVKG

SEQ ID NO: 1176 - protein, 17 aa, Artificial
  CDR2 sequence
GITRNSIRTRYADSVKG

SEQ ID NO: 1177 - protein, 17 aa, Artificial
  CDR2 sequence
AINRNGATAAYADSVKG

SEQ ID NO: 1178 - protein, 19 aa, Artificial
  CDR2 sequence
TIRWTGGSSSTSYADSVKG

SEQ ID NO: 1179 - protein, 17 aa, Artificial
  CDR2 sequence
AMNWSGGSTKYAESVKG

SEQ ID NO: 1180 - protein, 17 aa, Artificial
  CDR2 sequence
AISWSQYNTKYADSVKG

SEQ ID NO: 1181 - protein, 16 aa, Artificial
  CDR2 sequence
SITYGGNINYGDPVKG

SEQ ID NO: 1182 - protein, 17 aa, Artificial
  CDR2 sequence
GVNWGGGSTKVADSVKE

SEQ ID NO: 1183 - protein, 16 aa, Artificial
  CDR2 sequence
FTRWPSITYIAEHVKG

SEQ ID NO: 1184 - protein, 16 aa, Artificial
  CDR2 sequence
AITSDHITWYADAVKG

SEQ ID NO: 1185 - protein, 16 aa, Artificial
  CDR2 sequence
TINVGGGTYYAGPVKG

SEQ ID NO: 1186 - protein, 17 aa, Artificial
  CDR2 sequence
TINRRGGNTYYADSVKG

SEQ ID NO: 1187 - protein, 18 aa, Artificial
  CDR2 sequence
TISWSGGRDTVYADSVKG

SEQ ID NO: 1188 - protein, 17 aa, Artificial
  CDR2 sequence
CIESGDGTTTYVDSVKG

SEQ ID NO: 1189 - protein, 17 aa, Artificial
  CDR2 sequence
AINWSGGTTSFGDSVKG

SEQ ID NO: 1190 - protein, 17 aa, Artificial
  CDR2 sequence
AIRWSGGITWYAESVKS

SEQ ID NO: 1191 - protein, 17 aa, Artificial
  CDR2 sequence
AVRWSGGITWYAESVKG

SEQ ID NO: 1192 - protein, 17 aa, Artificial
  CDR2 sequence
TISRSGGRTSYADSVKG

SEQ ID NO: 1193 - protein, 17 aa, Artificial
  CDR2 sequence
TISRSGGRTSYADSVKG

SEQ ID NO: 1194 - protein, 15 aa, Artificial
  CDR2 sequence
RIAGGSTNYADSVKG

SEQ ID NO: 1195 - protein, 17 aa, Artificial
  CDR2 sequence
AIDWDGSRTQYADSVKG

SEQ ID NO: 1196 - protein, 17 aa, Artificial
  CDR2 sequence
TITWSGDSTYVTDSVKG

SEQ ID NO: 1197 - protein, 17 aa, Artificial
  CDR2 sequence
AINLSSGSTYYPDSVKG

SEQ ID NO: 1198 - protein, 17 aa, Artificial
  CDR2 sequence
AISRSGESTYFADSMKG

SEQ ID NO: 1199 - protein, 17 aa, Artificial
  CDR2 sequence
GISWDGGSTFYANSVKG

SEQ ID NO: 1200 - protein, 16 aa, Artificial
  CDR2 sequence
RIISDDSTLYADSVKG

SEQ ID NO: 1201 - protein, 17 aa, Artificial
  CDR2 sequence
TINWSGSHTDYADSVKG

SEQ ID NO: 1202 - protein, 17 aa, Artificial
  CDR2 sequence
AINWSGTHTDYADSVKG

SEQ ID NO: 1203 - protein, 16 aa, Artificial
  CDR2 sequence
AVGWYGSTYFADSVKG

SEQ ID NO: 1204 - protein, 16 aa, Artificial
  CDR2 sequence
LISAGDSTYYPDSVKG

SEQ ID NO: 1205 - protein, 17 aa, Artificial
  CDR2 sequence
AISWTGGSSYYGDSVKG

SEQ ID NO: 1206 - protein, 17 aa, Artificial
  CDR2 sequence
AINWSGSHRDYADSAKG

SEQ ID NO: 1207 - protein, 17 aa, Artificial
  CDR2 sequence
AINWSGGYTDYADSVKG

SEQ ID NO: 1208 - protein, 17 aa, Artificial
  CDR2 sequence
ATTRSGGLPYYSDSVKG

SEQ ID NO: 1209 - protein, 16 aa, Artificial
  CDR2 sequence
YIGTAGATHYADSVKG

SEQ ID NO: 1210 - protein, 16 aa, Artificial
  CDR2 sequence
TIIGDGRTHYADSVKD

SEQ ID NO: 1211 - protein, 17 aa, Artificial
  CDR2 sequence
SINWSGTHTYDADFVKG

SEQ ID NO: 1212 - protein, 17 aa, Artificial
  CDR2 sequence
TINWSGSHSDYADSVKG

SEQ ID NO: 1213 - protein, 16 aa, Artificial
  CDR2 sequence
GINWSGRTYYVDSVKG

SEQ ID NO: 1214 - protein, 26 aa, Artificial
  CDR2 sequence
AIRGSGGSTYIADPARSTYYADFVKG

SEQ ID NO: 1215 - protein, 17 aa, Artificial
  CDR2 sequence
ALSKDGARTYYAASVKG

SEQ ID NO: 1216 - protein, 17 aa, Artificial
  CDR2 sequence
TIRWSGSATFYSDSVKG

SEQ ID NO: 1217 - protein, 17 aa, Artificial
  CDR2 sequence
AISSSGVTTIYADSVRG

SEQ ID NO: 1218 - protein, 15 aa, Artificial
  CDR2 sequence
IVTDGFTNYADFAKG

SEQ ID NO: 1219 - protein, 15 aa, Artificial
  CDR2 sequence
IVTDGFTNYADFAKG

SEQ ID NO: 1220 - protein, 16 aa, Artificial
  CDR2 sequence
DISFGGNTNYANSVKG

SEQ ID NO: 1221 - protein, 17 aa, Artificial
  CDR2 sequence
CIANSEGTKYYADSAQG

SEQ ID NO: 1222 - protein, 17 aa, Artificial
  CDR2 sequence
SINSDGDTTYYADSVKG

SEQ ID NO: 1223 - protein, 17 aa, Artificial
  CDR2 sequence
AISRDGAATYYTDSVKG

SEQ ID NO: 1224 - protein, 18 aa, Artificial
  CDR2 sequence
CITPHHGGIIFTRESVKG

SEQ ID NO: 1225 - protein, 16 aa, Artificial
  CDR2 sequence
AVTSGGGTNYATSVKG

SEQ ID NO: 1226 - protein, 32 aa, Artificial
  FR3 sequence
RFTISRDNAKNTLFLQMNSLNPEDTAVYYCGQ

SEQ ID NO: 1227 - protein, 32 aa, Artificial
  FR3 sequence
RFTISRDNAKNTLFLQMNSLSPEDTAVYYCNQ

SEQ ID NO: 1228 - protein, 32 aa, Artificial
  FR3 sequence
RFTISRDNAKNTLFLQMNNLTPEDTAVYYCNR

SEQ ID NO: 1229 - protein, 32 aa, Artificial
  FR3 sequence
RFTISRDNAKNTLFLQMNNLRSEDTAVYSCNQ

SEQ ID NO: 1230 - protein, 32 aa, Artificial
  FR3 sequence
RFTISRDNAKNTLFLQMNSLRSEDTAVYYCNQ

SEQ ID NO: 1231 - protein, 32 aa, Artificial; identical to SEQ ID NO: 1230
  FR3 sequence

SEQ ID NO: 1232 - protein, 32 aa, Artificial; identical to SEQ ID NO: 1230
  FR3 sequence

SEQ ID NO: 1233 - protein, 32 aa, Artificial
  FR3 sequence
RFTISRDNAKNTVYLEMNSLTPEDTAVYYCNQ

SEQ ID NO: 1234 - protein, 32 aa, Artificial; identical to SEQ ID NO: 1230
  FR3 sequence

SEQ ID NO: 1235 - protein, 32 aa, Artificial; identical to SEQ ID NO: 1230
  FR3 sequence

SEQ ID NO: 1236 - protein, 32 aa, Artificial
  FR3 sequence
RFTISRDNAKNTLFLQMNSLTPEDTAVYYCNQ

SEQ ID NO: 1237 - protein, 32 aa, Artificial; identical to SEQ ID NO: 1236
  FR3 sequence

SEQ ID NO: 1238 - protein, 32 aa, Artificial
  FR3 sequence
RFTISRDNARNTLFLQMNSLTPEDTAIYYCNQ

SEQ ID NO: 1239 - protein, 32 aa, Artificial; identical to SEQ ID NO: 1227
  FR3 sequence

SEQ ID NO: 1240 - protein, 32 aa, Artificial; identical to SEQ ID NO: 1227
  FR3 sequence

SEQ ID NO: 1241 - protein, 32 aa, Artificial
  FR3 sequence
RFTISRDNAKNTLFLQMNSLSPEDTAVYYCNR

SEQ ID NO: 1242 - protein, 32 aa, Artificial; identical to SEQ ID NO: 1236
  FR3 sequence

SEQ ID NO: 1243 - protein, 32 aa, Artificial
  FR3 sequence
RFVISRDNAKNTLFLQMNSLSPEDTAVYYCNQ

SEQ ID NO: 1244 - protein, 32 aa, Artificial; identical to SEQ ID NO: 1236
  FR3 sequence

SEQ ID NO: 1245 - protein, 32 aa, Artificial; identical to SEQ ID NO: 1236
  FR3 sequence

SEQ ID NO: 1246 - protein, 32 aa, Artificial; identical to SEQ ID NO: 1236
  FR3 sequence

SEQ ID NO: 1247 - protein, 32 aa, Artificial
  FR3 sequence
RFTISRDNAKNTLFLQMNNLTPEDTAVYYCNQ

SEQ ID NO: 1248 - protein, 32 aa, Artificial; identical to SEQ ID NO: 1243
  FR3 sequence

SEQ ID NO: 1249 - protein, 32 aa, Artificial
  FR3 sequence
RFTISRDNAKNTLFLQMNSLSPEDTAVYYCNK

SEQ ID NO: 1250 - protein, 32 aa, Artificial
  FR3 sequence
RFTISRDNAKNTLFLQMNSLNPEDTAVYYCNQ

SEQ ID NO: 1251 - protein, 32 aa, Artificial; identical to SEQ ID NO: 1236
  FR3 sequence

SEQ ID NO: 1252 - protein, 32 aa, Artificial; identical to SEQ ID NO: 1236
  FR3 sequence

SEQ ID NO: 1253 - protein, 32 aa, Artificial
  FR3 sequence
RFTISRDNAKNTLFLQMNSLTPENTAVYYCNQ

SEQ ID NO: 1254 - protein, 32 aa, Artificial
  FR3 sequence
RFTISRDNAKNTLFLHMNNLSPEDTAVYYCGQ

SEQ ID NO: 1255 - protein, 32 aa, Artificial; identical to SEQ ID NO: 1236
  FR3 sequence

SEQ ID NO: 1256 - protein, 32 aa, Artificial; identical to SEQ ID NO: 1227
  FR3 sequence

SEQ ID NO: 1257 - protein, 32 aa, Artificial
  FR3 sequence
RFTISRDNAKKTVYLQMNSLQSEDTAVYYCGT

SEQ ID NO: 1258 - protein, 32 aa, Artificial
  FR3 sequence
RFTISRDNNKKTVYLQMNSLKSEDTAVYYCAT

SEQ ID NO: 1259 - protein, 32 aa, Artificial; identical to SEQ ID NO: 1257
  FR3 sequence

SEQ ID NO: 1260 - protein, 32 aa, Artificial
  FR3 sequence
RFTISRDNAKKTLYLQMNSLKSEDTAVYYCAT

SEQ ID NO: 1261 - protein, 32 aa, Artificial
  FR3 sequence
RFTISRNNANNTLYLQMNNLKFEDTAVYYCAK

SEQ ID NO: 1262 - protein, 32 aa, Artificial; identical to SEQ ID NO: 1261
  FR3 sequence

SEQ ID NO: 1263 - protein, 32 aa, Artificial
  FR3 sequence
RFTISRNNANNTLYLQMNSLKSEDTAVYYCAK

SEQ ID NO: 1264 - protein, 32 aa, Artificial; identical to SEQ ID NO: 1261
  FR3 sequence

SEQ ID NO: 1265 - protein, 32 aa, Artificial; identical to SEQ ID NO: 1263
  FR3 sequence

SEQ ID NO: 1266 - protein, 32 aa, Artificial
  FR3 sequence
RFTISRNNANNMLYLQMNSLKSEDTAVYYCAK

SEQ ID NO: 1267 - protein, 32 aa, Artificial; identical to SEQ ID NO: 1261
  FR3 sequence

SEQ ID NO: 1268 - protein, 32 aa, Artificial
  FR3 sequence
RFTISRNNANNTLYLQMNSLKSDDTAVYYCAK

SEQ ID NO: 1269 - protein, 32 aa, Artificial; identical to SEQ ID NO: 1263
  FR3 sequence

SEQ ID NO: 1270 - protein, 32 aa, Artificial; identical to SEQ ID NO: 1263
  FR3 sequence

SEQ ID NO: 1271 - protein, 32 aa, Artificial; identical to SEQ ID NO: 1263
  FR3 sequence

SEQ ID NO: 1272 - protein, 32 aa, Artificial; identical to SEQ ID NO: 1268
  FR3 sequence

SEQ ID NO: 1273 - protein, 32 aa, Artificial; identical to SEQ ID NO: 1263
  FR3 sequence

SEQ ID NO: 1274 - protein, 32 aa, Artificial; identical to SEQ ID NO: 1263
  FR3 sequence

SEQ ID NO: 1275 - protein, 32 aa, Artificial; identical to SEQ ID NO: 1263
  FR3 sequence

SEQ ID NO: 1276 - protein, 32 aa, Artificial; identical to SEQ ID NO: 1263
  FR3 sequence

SEQ ID NO: 1277 - protein, 32 aa, Artificial; identical to SEQ ID NO: 1268
  FR3 sequence

SEQ ID NO: 1278 - protein, 32 aa, Artificial; identical to SEQ ID NO: 1263
  FR3 sequence

SEQ ID NO: 1279 - protein, 32 aa, Artificial; identical to SEQ ID NO: 1263
  FR3 sequence

SEQ ID NO: 1280 - protein, 32 aa, Artificial; identical to SEQ ID NO: 1263
  FR3 sequence

SEQ ID NO: 1281 - protein, 32 aa, Artificial; identical to SEQ ID NO: 1263
  FR3 sequence

SEQ ID NO: 1282 - protein, 32 aa, Artificial; identical to SEQ ID NO: 1268
  FR3 sequence

SEQ ID NO: 1283 - protein, 32 aa, Artificial; identical to SEQ ID NO: 1263
  FR3 sequence

SEQ ID NO: 1284 - protein, 32 aa, Artificial; identical to SEQ ID NO: 1263
  FR3 sequence

SEQ ID NO: 1285 - protein, 32 aa, Artificial; identical to SEQ ID NO: 1268
  FR3 sequence

SEQ ID NO: 1286 - protein, 32 aa, Artificial; identical to SEQ ID NO: 1263
  FR3 sequence

SEQ ID NO: 1287 - protein, 32 aa, Artificial
  FR3 sequence
RFTISRDNAKNTVYLQMNSLKPEDTAVYYCKR

SEQ ID NO: 1288 - protein, 32 aa, Artificial
  FR3 sequence
RFTISRDNAKNTLHLQMNSLKPEDTAVYYCAY

SEQ ID NO: 1289 - protein, 32 aa, Artificial
  FR3 sequence
RFTISRVNAKDTVYLQMNSLKPEDTAVYYCYM

SEQ ID NO: 1290 - protein, 32 aa, Artificial
  FR3 sequence
RFTISRDNAKKTVYLQMNSLKPEDTARYYCGV

SEQ ID NO: 1291 - protein, 32 aa, Artificial
  FR3 sequence
RFTISRDNAKETVYLQMNSLKPDDTGVYYCAA

SEQ ID NO: 1292 - protein, 32 aa, Artificial
  FR3 sequence
RFTISRDNAKETVYLQMNSLKPEDTGVYYCAA

SEQ ID NO: 1293 - protein, 32 aa, Artificial; identical to SEQ ID NO: 1291
  FR3 sequence

SEQ ID NO: 1294 - protein, 32 aa, Artificial; identical to SEQ ID NO: 1291
  FR3 sequence

SEQ ID NO: 1295 - protein, 32 aa, Artificial
  FR3 sequence
RFTISRDNAKKTVYLQMNSLKPEDTAVYYCAT

SEQ ID NO: 1296 - protein, 32 aa, Artificial
  FR3 sequence
RFTISRDNAKKTAYLQMNSLKPEDTAVYYCAA

SEQ ID NO: 1297 - protein, 32 aa, Artificial; identical to SEQ ID NO: 1296
  FR3 sequence

SEQ ID NO: 1298 - protein, 32 aa, Artificial; identical to SEQ ID NO: 1295
  FR3 sequence

SEQ ID NO: 1299 - protein, 32 aa, Artificial
  FR3 sequence
RFTISRDNAKKTVYLQMNSLKPEDTAVYYCAA

SEQ ID NO: 1300 - protein, 32 aa, Artificial; identical to SEQ ID NO: 1299
  FR3 sequence

SEQ ID NO: 1301 - protein, 32 aa, Artificial; identical to SEQ ID NO: 1299
  FR3 sequence

SEQ ID NO: 1302 - protein, 32 aa, Artificial
  FR3 sequence
RFTMARDNANHTVHLQMNSLKPEDTAVYYCNA

SEQ ID NO: 1303 - protein, 32 aa, Artificial
  FR3 sequence
RFTVSRDIAENTVYLQMNTLKSEDTAVYYCAA

SEQ ID NO: 1304 - protein, 32 aa, Artificial
  FR3 sequence
RFTISSDNAKNTVYLQMNSLKPEDTAVYYCAA

SEQ ID NO: 1305 - protein, 32 aa, Artificial
  FR3 sequence
RFTISRDNAKNTLYLQMSSLKPEDTALYYCTK

SEQ ID NO: 1306 - protein, 32 aa, Artificial
  FR3 sequence
RFTISRDNAKNTLYLQMNSLKPEDTAVYYCAA

SEQ ID NO: 1307 - protein, 32 aa, Artificial
  FR3 sequence
RFTVSRDNANNTVYLQMNTLKPEDTAVYYCRD

SEQ ID NO: 1308 - protein, 32 aa, Artificial
  FR3 sequence
RFTVSRDNAKNTVYLQMNSLKAEDTAVYYCWD

SEQ ID NO: 1309 - protein, 32 aa, Artificial; identical to SEQ ID NO: 1307
  FR3 sequence

SEQ ID NO: 1310 - protein, 32 aa, Artificial
  FR3 sequence
RFTVSRDNDKNTLYLQMNSLKPEDTAVYYCRD

SEQ ID NO: 1311 - protein, 32 aa, Artificial; identical to SEQ ID NO: 1307
  FR3 sequence

SEQ ID NO: 1312 - protein, 32 aa, Artificial
  FR3 sequence
RFTVSRDNAKNTLYLQMNSLKPEDTATYLCRD

SEQ ID NO: 1313 - protein, 32 aa, Artificial
  FR3 sequence
RFTVSRDNAKNTLYLQMNSLEPEDTATYYCWD

SEQ ID NO: 1314 - protein, 32 aa, Artificial
  FR3 sequence
RFTVSRDNAKNTLYLRMNSLKSEDSATYTCRA

SEQ ID NO: 1315 - protein, 32 aa, Artificial
  FR3 sequence
RFTVSRDNAKNTVYLQMNSLKPEDTAVYYCRD

SEQ ID NO: 1316 - protein, 32 aa, Artificial
  FR3 sequence
RFTVSRDNANHTVYLQMNSLKPEDTAVYYCRD

SEQ ID NO: 1317 - protein, 32 aa, Artificial; identical to SEQ ID NO: 1315
  FR3 sequence

SEQ ID NO: 1318 - protein, 32 aa, Artificial; identical to SEQ ID NO: 1315
  FR3 sequence

SEQ ID NO: 1319 - protein, 32 aa, Artificial
  FR3 sequence
RFTVSRDNAKNTLYLQMNSLKPEDTAVYYCWD

SEQ ID NO: 1320 - protein, 32 aa, Artificial
  FR3 sequence
RFAISRDNAKNTAYLQMNSLKAEDTAVYYCNA

SEQ ID NO: 1321 - protein, 32 aa, Artificial; identical to SEQ ID NO: 1302
  FR3 sequence

SEQ ID NO: 1322 - protein, 32 aa, Artificial; identical to SEQ ID NO: 1302
  FR3 sequence

SEQ ID NO: 1323 - protein, 32 aa, Artificial
  FR3 sequence
RFTISRDNAENTVYLQMNSLKPEDTAVYYCWD

SEQ ID NO: 1324 - protein, 32 aa, Artificial
  FR3 sequence
RFTISRDNAKNTVYLQINSLKPEDTAVYYCWD

SEQ ID NO: 1325 - protein, 32 aa, Artificial
  FR3 sequence
RFTISRDNAKKTMYLQMNSLKPDDTAVYYCRD

SEQ ID NO: 1326 - protein, 32 aa, Artificial
  FR3 sequence
RFTVSRDNAENTVYLQMNSLKPEDTAVYYCRD

SEQ ID NO: 1327 - protein, 32 aa, Artificial
  FR3 sequence
RFTLSRDNAKNTVYLQMNSLKPEDTAVYYCRD

SEQ ID NO: 1328 - protein, 32 aa, Artificial; identical to SEQ ID NO: 1323
  FR3 sequence

SEQ ID NO: 1329 - protein, 32 aa, Artificial
  FR3 sequence
RFTLSRHNAENTVYLQMNSLKPEDTAVYYCRD

SEQ ID NO: 1330 - protein, 32 aa, Artificial
  FR3 sequence
RFTISSDNAKSTIYLQMNSLKPDDTAVYYCRD

SEQ ID NO: 1331 - protein, 32 aa, Artificial
  FR3 sequence
RFTISSDNAKNTIYLQMNSLKPDDTAVYYCRD

SEQ ID NO: 1332 - protein, 32 aa, Artificial
  FR3 sequence
RFTISRDNAKKTVYLQMNSLKPEDTAVYYCRD

SEQ ID NO: 1333 - protein, 32 aa, Artificial
  FR3 sequence
RFTISRDGATNTVFLQMNNLKPEDTAVYYCRD

SEQ ID NO: 1334 - protein, 32 aa, Artificial; identical to SEQ ID NO: 1326
  FR3 sequence

SEQ ID NO: 1335 - protein, 32 aa, Artificial
  FR3 sequence
RFTVSRDNADNTVYLQMNSLKPEDTAVYYCRD

SEQ ID NO: 1336 - protein, 32 aa, Artificial
  FR3 sequence
RFTISSDNAKSTIYLQMNSLEPDDTAVYYCRD

SEQ ID NO: 1337 - protein, 32 aa, Artificial
  FR3 sequence
RFTISSDNAKKTIYLQMNSLKPDDTAVYYCRD

SEQ ID NO: 1338 - protein, 32 aa, Artificial; identical to SEQ ID NO: 1330
  FR3 sequence

SEQ ID NO: 1339 - protein, 32 aa, Artificial
  FR3 sequence
RFTISRDNAKNAVILQMNNLKTEDTAVYYCAA

SEQ ID NO: 1340 - protein, 32 aa, Artificial; identical to SEQ ID NO: 1339
  FR3 sequence

SEQ ID NO: 1341 - protein, 32 aa, Artificial
  FR3 sequence
RFTISNDNAKDTVYLQMNSLKSEDTAVYYCRN

SEQ ID NO: 1342 - protein, 32 aa, Artificial
  FR3 sequence
RFTISRDNAKNTVYLQMNSLKPEDTGVYYCRD

SEQ ID NO: 1343 - protein, 32 aa, Artificial
  FR3 sequence
RFTISKDYTRNTVYLQVNSLKPEDTAVYHCAT

SEQ ID NO: 1344 - protein, 32 aa, Artificial
  FR3 sequence
RFTISGDTAKSTLYLQMNSLKPEDTAMYYCYG

SEQ ID NO: 1345 - protein, 32 aa, Artificial
  FR3 sequence
RFAISRDNAKNTVYLQMNSLKPEDTAVYYCRD

SEQ ID NO: 1346 - protein, 32 aa, Artificial
  FR3 sequence
RFAISRDNAKNMVYLQMNTLKPEDTAVYYCRD

SEQ ID NO: 1347 - protein, 32 aa, Artificial; identical to SEQ ID NO: 1345
  FR3 sequence

SEQ ID NO: 1348 - protein, 32 aa, Artificial
  FR3 sequence
RFAISRDNAKNTVYLQMNTLKPEDTAVYYCRD

SEQ ID NO: 1349 - protein, 32 aa, Artificial
  FR3 sequence
RFAISRDNAKNTVYLQMRSLKPEDTAVYYCRD

SEQ ID NO: 1350 - protein, 32 aa, Artificial
  FR3 sequence
RFTISRDNAKNTVYLQMNSLKPEDTAVYYCRD

SEQ ID NO: 1351 - protein, 32 aa, Artificial
  FR3 sequence
RFTISRDNAKNTVYLQMNNLKPEDTAVYYCRD

SEQ ID NO: 1352 - protein, 32 aa, Artificial
  FR3 sequence
RFTISRDNAKKTVYLQMNSLKPEDTAVYFCRD

SEQ ID NO: 1353 - protein, 32 aa, Artificial
  FR3 sequence
RFTFSKDGAKNTVYLQMNSLKPEDTAVYYCRD

SEQ ID NO: 1354 - protein, 32 aa, Artificial; identical to SEQ ID NO: 1350
  FR3 sequence

SEQ ID NO: 1355 - protein, 32 aa, Artificial
  FR3 sequence
RFTLSRDNAKKTVYLQMNSLKPEDTAIYYCRD

SEQ ID NO: 1356 - protein, 34 aa, Artificial
  FR3 sequence
RFTISISRDNVEYTVDLQMDSLKPEDTAVYYCRD

SEQ ID NO: 1357 - protein, 32 aa, Artificial
  FR3 sequence
RFTISRDNAKNTVYLQVNSLKPEDTAVYYCWD

SEQ ID NO: 1358 - protein, 32 aa, Artificial
  FR3 sequence
RFTISRDNAKNTLYLQMNSLKPEDTALYYCTK

SEQ ID NO: 1359 - protein, 32 aa, Artificial
  FR3 sequence
RFTISRDNAKNTVYLEMNSLKPEDTGVYYCNG

SEQ ID NO: 1360 - protein, 32 aa, Artificial; identical to SEQ ID NO: 1359
  FR3 sequence

SEQ ID NO: 1361 - protein, 32 aa, Artificial
  FR3 sequence
RFTISRDNTKNTLDLQMNSLKPEDTAVYYCHG

SEQ ID NO: 1362 - protein, 32 aa, Artificial
  FR3 sequence
RFTISRDNAKNTVVLQMNGLKPEDTAVYYCKG

SEQ ID NO: 1363 - protein, 32 aa, Artificial
  FR3 sequence
RFTISRDNAKNTVYLQMNDLKPEDTAVYYCNG

SEQ ID NO: 1364 - protein, 32 aa, Artificial
  FR3 sequence
RFTIARDNAKNTVSLQMNSLKPEDTAVYYCNL

SEQ ID NO: 1365 - protein, 32 aa, Artificial
  FR3 sequence
RFTISRDNTKNTMYLQMVSLKPEDTAVYYCNV

SEQ ID NO: 1366 - protein, 32 aa, Artificial
  FR3 sequence
RFTISRDNAKNTVYLQMASLKPEDTAAYYCAA

SEQ ID NO: 1367 - protein, 32 aa, Artificial
  FR3 sequence
RFTISRDNVKNTLYLQMNSLKSEDTAVYYCAK

SEQ ID NO: 1368 - protein, 32 aa, Artificial
  FR3 sequence
RFTISRDNAKNTVYLQMNSLKPEDTAVYYCAT

SEQ ID NO: 1369 - protein, 32 aa, Artificial
  FR3 sequence
RFTISRDNAKNAVHLQMNSLRLEDTAVYYCNA

SEQ ID NO: 1370 - protein, 32 aa, Artificial
  FR3 sequence
RFTISRDNPETAVHLQMNSLKLEDTAVYYCNA

SEQ ID NO: 1371 - protein, 32 aa, Artificial
  FR3 sequence
RFTISRDNARDTLFLQMHALQPEDTAVYMCNL

SEQ ID NO: 1372 - protein, 32 aa, Artificial
  FR3 sequence
RFTISRDNAKNTLYLQMSSLKPEDTALYYCAK

SEQ ID NO: 1373 - protein, 32 aa, Artificial
  FR3 sequence
RFTISTDNAKNTLYLQMSSLKPEDTALYYCAK

SEQ ID NO: 1374 - protein, 32 aa, Artificial; identical to SEQ ID NO: 1368
  FR3 sequence

SEQ ID NO: 1375 - protein, 32 aa, Artificial
  FR3 sequence
RFTISRDNAKKTLYLQMNSLQSEDTAVYYCAK

SEQ ID NO: 1376 - protein, 32 aa, Artificial; identical to SEQ ID NO: 1350
  FR3 sequence

SEQ ID NO: 1377 - protein, 32 aa, Artificial; identical to SEQ ID NO: 1350
  FR3 sequence

SEQ ID NO: 1378 - protein, 32 aa, Artificial; identical to SEQ ID NO: 1350
  FR3 sequence

SEQ ID NO: 1379 - protein, 32 aa, Artificial; identical to SEQ ID NO: 1350
  FR3 sequence

SEQ ID NO: 1380 - protein, 32 aa, Artificial
  FR3 sequence
RFTISRDNAKNTVYLQMNSLKPEDTAVYYCAS

SEQ ID NO: 1381 - protein, 32 aa, Artificial
  FR3 sequence
RFTISRDNAKNTLYLQMNSLKPEDTAVYYCAR

SEQ ID NO: 1382 - protein, 32 aa, Artificial
  FR3 sequence
RFTTSRDNAKNTVYLQMNDLKPEDTAVYYCAA

SEQ ID NO: 1383 - protein, 32 aa, Artificial; identical to SEQ ID NO: 112
  FR3 sequence

SEQ ID NO: 1384 - protein, 32 aa, Artificial
  FR3 sequence
RFTISRANAKNTVYLQMNGLKPEDTAVYYCAA

SEQ ID NO: 1385 - protein, 32 aa, Artificial
  FR3 sequence
RFTISRDNAKITVYLQMNSLKPEDTAVYYCAA

SEQ ID NO: 1386 - protein, 32 aa, Artificial; identical to SEQ ID NO: 112
  FR3 sequence

SEQ ID NO: 1387 - protein, 32 aa, Artificial; identical to SEQ ID NO: 112
  FR3 sequence

SEQ ID NO: 1388 - protein, 32 aa, Artificial
  FR3 sequence
RFTISRDNAKNTVYLQMNSLSPEDTAVYYCAA

SEQ ID NO: 1389 - protein, 32 aa, Artificial; identical to SEQ ID NO: 112
  FR3 sequence

SEQ ID NO: 1390 - protein, 32 aa, Artificial
  FR3 sequence
RFTISRDSAKNAVNLQMELVESDDTAVYYCAA

SEQ ID NO: 1391 - protein, 32 aa, Artificial
  FR3 sequence
RFTISRDSAKNTVYLQMDSLKPEDTAVYVCNA

SEQ ID NO: 1392 - protein, 32 aa, Artificial
  FR3 sequence
RFTISRDNAKNSVYLQMNSLKPEDTAIYYCAA

SEQ ID NO: 1393 - protein, 32 aa, Artificial
  FR3 sequence
RFTISRDNAKNTVYLQMNSLKPEDTAVYYCGA

SEQ ID NO: 1394 - protein, 32 aa, Artificial; identical to SEQ ID NO: 1393
  FR3 sequence

SEQ ID NO: 1395 - protein, 32 aa, Artificial
  FR3 sequence
RFTIARDDAKNTMYLQMNGMKPEDTAVYYCKM

SEQ ID NO: 1396 - protein, 32 aa, Artificial
  FR3 sequence
RFDISRDNAKNTVYLQMNRLKPEDTAVYYCAA

SEQ ID NO: 1397 - protein, 32 aa, Artificial
  FR3 sequence
RFAISRDNALNTVYLQMNSLKPEDTAVYYCAA

SEQ ID NO: 1398 - protein, 32 aa, Artificial
  FR3 sequence
RFTISRDNGKNTVDLRMNSLKPEDTAVYYCAA

SEQ ID NO: 1399 - protein, 32 aa, Artificial; identical to SEQ ID NO: 112
  FR3 sequence

SEQ ID NO: 1400 - protein, 32 aa, Artificial
  FR3 sequence
RFTISRDDAKNTVYLQMNSLKAEDTAIYYCAA

SEQ ID NO: 1401 - protein, 32 aa, Artificial
  FR3 sequence
RFTVSRDNAQNTVYLQMNSLKIEDTGVYYCNA

SEQ ID NO: 1402 - protein, 32 aa, Artificial
  FR3 sequence
RFTISGDDARNTVYLQMNSLNPEDTAVYYCNA

SEQ ID NO: 1403 - protein, 32 aa, Artificial
  FR3 sequence
RFTISRDNSENTVYFEMGSLKPEDTAVYYCAI

SEQ ID NO: 1404 - protein, 32 aa, Artificial
  FR3 sequence
RFTISRDNAKGTVYLQMSSLKPEDTAVYYCAA

SEQ ID NO: 1405 - protein, 32 aa, Artificial
  FR3 sequence
RFTISRDNTKNTVYLQMNSMRPEDTAVYYCAA

SEQ ID NO: 1406 - protein, 32 aa, Artificial
  FR3 sequence
RFTISRDIANDVVYLQMNSLEPEDTAVYYCAR

SEQ ID NO: 1407 - protein, 32 aa, Artificial
  FR3 sequence
RFTISRDNAKNTLYLQTTSLRPEDTGVYYCAE

SEQ ID NO: 1408 - protein, 32 aa, Artificial
  FR3 sequence
RFTISKDNAKNTVYLQMNSLKPEDTAVYYCAA

SEQ ID NO: 1409 - protein, 32 aa, Artificial; identical to SEQ ID NO: 112
  FR3 sequence

SEQ ID NO: 1410 - protein, 32 aa, Artificial
  FR3 sequence
RFTISRDYAKNTWYLQMNTLKPEDTAAYYCAA

SEQ ID NO: 1411 - protein, 32 aa, Artificial
  FR3 sequence
RFTISRDNAKNTVQLQMNSLKPEDTAVYYCAV

SEQ ID NO: 1412 - protein, 32 aa, Artificial
  FR3 sequence
RFTISRDNAKNTVYLQMTSLMPEDTAVYYCAD

SEQ ID NO: 1413 - protein, 32 aa, Artificial; identical to SEQ ID NO: 112
  FR3 sequence

SEQ ID NO: 1414 - protein, 32 aa, Artificial
  FR3 sequence
RFTISRDNAKDTMYLQMNVLKPEDTAVYYCAA

SEQ ID NO: 1415 - protein, 32 aa, Artificial
  FR3 sequence
RFTISRDNAKNTVYLRMNSLKPEDTAVYYCAT

SEQ ID NO: 1416 - protein, 32 aa, Artificial
  FR3 sequence
RFTISRDDAKNTVYLQMNSLKPEDTAVYLCAA

SEQ ID NO: 1417 - protein, 32 aa, Artificial
  FR3 sequence
RVTISRDDAKNTVYLRMNSLKPEDTAVYYCAA

SEQ ID NO: 1418 - protein, 32 aa, Artificial
  FR3 sequence
RFTISRDDAKNTVYLRMNSLKPEDTAVYYCAA

SEQ ID NO: 1419 - protein, 32 aa, Artificial
  FR3 sequence
RFTISRDNAKNTVYLRMNSLKPEDTAVYYCAA

SEQ ID NO: 1420 - protein, 32 aa, Artificial
  FR3 sequence
RFTIARDDAKNTVYLQMNSLKPEDTAVYYCAL

SEQ ID NO: 1421 - protein, 32 aa, Artificial
  FR3 sequence
RFTISRDNAKNTLYLQMNSLKPEDTAVYYCAK

SEQ ID NO: 1422 - protein, 32 aa, Artificial
  FR3 sequence
RFTISRDNAKNGVSLQMDSLKAEDTAVYYCAS

SEQ ID NO: 1423 - protein, 32 aa, Artificial
  FR3 sequence
RFTISSDNAKNTVYLQMNSLKPEDTALYYCAR

SEQ ID NO: 1424 - protein, 32 aa, Artificial
  FR3 sequence
RFTISRDDAKNTVYLQMNSLKPEDTAVYYCAA

SEQ ID NO: 1425 - protein, 32 aa, Artificial
  FR3 sequence
RFTISIDNAKNTVYLQMNNLTPEDTAVYYCAA

SEQ ID NO: 1426 - protein, 32 aa, Artificial
  FR3 sequence
RFTISRDNAKNTVYLQMDSLKPEDTAVYYCAA

SEQ ID NO: 1427 - protein, 32 aa, Artificial
  FR3 sequence
RFTISKENAKNTVYLQMTILKPEDTAVYYCAS

SEQ ID NO: 1428 - protein, 32 aa, Artificial
  FR3 sequence
RFTISRDSAKDTVYLQMNNLKPEDTAVYYCAA

SEQ ID NO: 1429 - protein, 32 aa, Artificial
  FR3 sequence
RFTISRDNAKNAVNLQMSNLKPEDTALHYCTI

SEQ ID NO: 1430 - protein, 32 aa, Artificial
  FR3 sequence
RFTISRDNARNAVNPQMNNLKPEDTAVYYCTI

SEQ ID NO: 1431 - protein, 32 aa, Artificial
  FR3 sequence
RFTISRDNAKNAVYLQMNSLKPEDTAVYYCAA

SEQ ID NO: 1432 - protein, 32 aa, Artificial
  FR3 sequence
RFTISRDNAKNAVNLQMSNLKPEDTALYYCTI

SEQ ID NO: 1433 - protein, 32 aa, Artificial
  FR3 sequence
RFTISRSIAENTVYLQMNKVKPEDTAVYYCAA

SEQ ID NO: 1434 - protein, 32 aa, Artificial
  FR3 sequence
RFTISRDNAKNTVYLQMNSLKPEDTAVYYCNA

SEQ ID NO: 1435 - protein, 32 aa, Artificial
  FR3 sequence
RFTISRDNAKSTMYLQMNSLKPEDTAVYYCAA

SEQ ID NO: 1436 - protein, 32 aa, Artificial
  FR3 sequence
RFTISRDNAKNTLYLQMNSLKAEDTAVYYCNA

SEQ ID NO: 1437 - protein, 32 aa, Artificial
  FR3 sequence
RFTISRDDAKNSIYLQMNTLKPEDTAVYYCAA

SEQ ID NO: 1438 - protein, 32 aa, Artificial
  FR3 sequence
RFTISRDNAKNTVYLQMNSLIPEDTAVYYCAA

SEQ ID NO: 1439 - protein, 32 aa, Artificial
  FR3 sequence
RFTVSRDNGRNTVYLQMNSLKPEDTAVYYCNV

SEQ ID NO: 1440 - protein, 32 aa, Artificial
  FR3 sequence
RFTISRDKAKNTVLLQMDSLKPEDTAVYYCNA

SEQ ID NO: 1441 - protein, 32 aa, Artificial
  FR3 sequence
RFTISRDKAKNALYLQMNSLKPEDMAVYYCNA

SEQ ID NO: 1442 - protein, 32 aa, Artificial
  FR3 sequence
RFTISRDNAKNTVYLEMNNLKPEDTAVYYCNA

SEQ ID NO: 1443 - protein, 32 aa, Artificial
  FR3 sequence
RFTISRDNAENTVYLQMNNLKPEDMAVYYCNA

SEQ ID NO: 1444 - protein, 32 aa, Artificial
  FR3 sequence
RFTISRDNAKSTVYLQMDSLKPEDTAVYYCAA

SEQ ID NO: 1445 - protein, 32 aa, Artificial
  FR3 sequence
RFTISRDNSKNTVSLQMNSLKPEDTAVYYCAA

SEQ ID NO: 1446 - protein, 32 aa, Artificial
  FR3 sequence
RFTIFRDNAENTAYLQMNSLNPEDTAVYYCAV

SEQ ID NO: 1447 - protein, 32 aa, Artificial
  FR3 sequence
RFTISRDNAESTVYLQMNSLKAEDTAVYYCAA

SEQ ID NO: 1448 - protein, 32 aa, Artificial
  FR3 sequence
RFAISRDGAKNTVYLQMDSLKPEDTAVYYCNL

SEQ ID NO: 1449 - protein, 32 aa, Artificial
  FR3 sequence
RFAISRDNAKNTVYLQMHSLKPEDTAVYHCAT

SEQ ID NO: 1450 - protein, 32 aa, Artificial
  FR3 sequence
RFTISRDNADNTVTLQMNSLKPEDTAVYYCAG

SEQ ID NO: 1451 - protein, 32 aa, Artificial; identical to SEQ ID NO: 1450
  FR3 sequence

SEQ ID NO: 1452 - protein, 32 aa, Artificial
  FR3 sequence
RFTISRDNAEDLLYLQMNLLKPEDTAVYYCAA

SEQ ID NO: 1453 - protein, 32 aa, Artificial
  FR3 sequence
RFTISKNTAENTVYLQMNSLKPEDTAVYYCAV

SEQ ID NO: 1454 - protein, 32 aa, Artificial
  FR3 sequence
RFTISRANDNNPLYLQMNTLKPEDTAVYYCAA

SEQ ID NO: 1455 - protein, 32 aa, Artificial
  FR3 sequence
RFTISRDNAINSLYLQMDTLKPEDTAVYYCAA

SEQ ID NO: 1456 - protein, 32 aa, Artificial
  FR3 sequence
RFSISRDNALKTVYLQMNSLKPEDTAVYYCYA

SEQ ID NO: 1457 - protein, 32 aa, Artificial
  FR3 sequence
RFTISRDYDNSPVYLQMNTLKPEDTAVYYCAA

SEQ ID NO: 1458 - protein, 32 aa, Artificial
  FR3 sequence
RFTISRDNAKNTVYLQMNSLEREDTAVYYCAA

SEQ ID NO: 1459 - protein, 32 aa, Artificial
  FR3 sequence
RFTISRDNAKNTVTLQMNSLRPEDTAVYYCAA

SEQ ID NO: 1460 - protein, 32 aa, Artificial
  FR3 sequence
RFTISRDNAKNSVYLQMNSLKPEDTSVYYCNV

SEQ ID NO: 1461 - protein, 32 aa, Artificial
  FR3 sequence
RFTISRDNARNTVYLQMNSLKPEDTAVYYCAA

SEQ ID NO: 1462 - protein, 32 aa, Artificial; identical to SEQ ID NO: 112
  FR3 sequence

SEQ ID NO: 1463 - protein, 32 aa, Artificial
  FR3 sequence
RFTISRDNAKNAVYLQMNSLKPEDTGVYYCAT

SEQ ID NO: 1464 - protein, 32 aa, Artificial; identical to SEQ ID NO: 112
  FR3 sequence

SEQ ID NO: 1465 - protein, 32 aa, Artificial
  FR3 sequence
RFTISRDNTKNTIDLQINSLKPEDTAVYYCAA

SEQ ID NO: 1466 - protein, 32 aa, Artificial; identical to SEQ ID NO: 1465
  FR3 sequence

SEQ ID NO: 1467 - protein, 32 aa, Artificial
  FR3 sequence
RFIVSRDNAKNTADLQMNDLKPEDTAVYYCGA

SEQ ID NO: 1468 - protein, 32 aa, Artificial
  FR3 sequence
RFIVSRDNAKNTADLQMNELKPEDTAVYYCGA

SEQ ID NO: 1469 - protein, 32 aa, Artificial
  FR3 sequence
RFTISRDDAKNTVFLQMNSLKPEDTAVYYCNV

SEQ ID NO: 1470 - protein, 32 aa, Artificial
  FR3 sequence
RFTISRENVKDTMYLQMNSLQAEDTGVYYCVR

SEQ ID NO: 1471 - protein, 32 aa, Artificial
  FR3 sequence
RFTISRDNARNTAYLQMDSLRPEDTAVYSCAA

SEQ ID NO: 1472 - protein, 32 aa, Artificial
  FR3 sequence
RFTISRGNAKNTVNLQMNSLKPEDTAVYYCAA

SEQ ID NO: 1473 - protein, 32 aa, Artificial
  FR3 sequence
RFTISRDNTESTGYLQMNNLKPEDTAVYYCAA

SEQ ID NO: 1474 - protein, 32 aa, Artificial
  FR3 sequence
RFTISRDNAKNMVYLQMNSLKPEDTAVYYCAA

SEQ ID NO: 1475 - protein, 32 aa, Artificial
  FR3 sequence
RFTISRDYAKNTAYLQMNSLKPEDTAVYYCVA

SEQ ID NO: 1476 - protein, 32 aa, Artificial
  FR3 sequence
RFTISRDNAENTVYLQMNSLTPEDTAVYYCAS

SEQ ID NO: 1477 - protein, 32 aa, Artificial
  FR3 sequence
RFTISRDNAENTVYLLMNSLIPEDTAVYYCAT

SEQ ID NO: 1478 - protein, 32 aa, Artificial
  FR3 sequence
RFTIYRDNAQNTMYLQMNSLKPEDTAVYYCAA

SEQ ID NO: 1479 - protein, 32 aa, Artificial
  FR3 sequence
RFTVSRDNAKNTVYLQMNSLKPEDTAVYYCNA

SEQ ID NO: 1480 - protein, 32 aa, Artificial
  FR3 sequence
RSTISRENAENTVYLQMNSLKPEDTAVYYCAA

SEQ ID NO: 1481 - protein, 32 aa, Artificial
  FR3 sequence
RFTISRDNAKKTAYLQMNSLRPEDTAVYYCVG

SEQ ID NO: 1482 - protein, 32 aa, Artificial
  FR3 sequence
RFTISRDNTKNTVYLQMNSLKPEDTAVYYCRP

SEQ ID NO: 1483 - protein, 32 aa, Artificial
  FR3 sequence
RFTISRDNAKNTVDLQMSSLKPEDTAAYYCAA

SEQ ID NO: 1484 - protein, 32 aa, Artificial
  FR3 sequence
RFTISRDNAENLVYLQMNNLKPEDTAVYYCSA

SEQ ID NO: 1485 - protein, 32 aa, Artificial
  FR3 sequence
RFTISRDAAANLVYLQMNSLKPSDTAIYSCNA

SEQ ID NO: 1486 - protein, 32 aa, Artificial
  FR3 sequence
RFIISRDNAKNTVYLQINSLKPEDTAVYYCAA

SEQ ID NO: 1487 - protein, 32 aa, Artificial
  FR3 sequence
RFTISRDNAKNTVYLQMNNLKSEDTAVYYCAP

SEQ ID NO: 1488 - protein, 32 aa, Artificial
  FR3 sequence
RFTFSRDNAKNTVYLQMNSLKPEDTAIYLCAV

SEQ ID NO: 1489 - protein, 32 aa, Artificial
  FR3 sequence
RFTISRDNAKNTVYLQMNSLKPEDTAVYYCAC

SEQ ID NO: 1490 - protein, 32 aa, Artificial
  FR3 sequence
RFTIYRDNAKNVVYLQMSVLNGEDTAVYYCAA

SEQ ID NO: 1491 - protein, 32 aa, Artificial; identical to SEQ ID NO: 112
  FR3 sequence

SEQ ID NO: 1492 - protein, 32 aa, Artificial
  FR3 sequence
RFTISRDEAKNTVYLEMNSLKTDDTAVYYCAA

SEQ ID NO: 1493 - protein, 32 aa, Artificial
  FR3 sequence
RFTISRDNAKTTVYLQMNSLQPEDTARYYCRY

SEQ ID NO: 1494 - protein, 32 aa, Artificial; identical to SEQ ID NO: 1493
  FR3 sequence

SEQ ID NO: 1495 - protein, 32 aa, Artificial
  FR3 sequence
RFTISRDNAKNTVYLQMNSLKPEDTAVYYCYA

SEQ ID NO: 1496 - protein, 32 aa, Artificial
  FR3 sequence
RLPISSDNAKKTVYLQMDSLKPEDTAVYYCAA

SEQ ID NO: 1497 - protein, 32 aa, Artificial
  FR3 sequence
RFTISRDNDENMLYLQMNSLKPEDTAVYYCAT

SEQ ID NO: 1498 - protein, 32 aa, Artificial
  FR3 sequence
RFTISRDNAKNTVFLQMNSLKPEDTAIYYCAA

SEQ ID NO: 1499 - protein, 32 aa, Artificial
  FR3 sequence
RFATSSDSAKNTVYLQMHSLKPEDTAVYYCAT

SEQ ID NO: 1500 - protein, 32 aa, Artificial
  FR3 sequence
RFIISRDDSKNTVDLQMNSLKPEDTAVYYCNL

SEQ ID NO: 1501 - protein, 9 aa, Artificial
  CDR3 sequence
GWKIVPTNP

SEQ ID NO: 1502 - protein, 9 aa, Artificial
  CDR3 sequence
GWKIRPTIP

SEQ ID NO: 1503 - protein, 9 aa, Artificial
  CDR3 sequence
GWKIVPTDL

SEQ ID NO: 1504 - protein, 9 aa, Artificial
  CDR3 sequence
GWKIVPTDR

SEQ ID NO: 1505 - protein, 9 aa, Artificial
  CDR3 sequence
GWKIVPTDR

SEQ ID NO: 1506 - protein, 9 aa, Artificial
  CDR3 sequence
GWKIVPTDR

SEQ ID NO: 1507 - protein, 9 aa, Artificial
  CDR3 sequence
GWKIVPTDR

SEQ ID NO: 1508 - protein, 9 aa, Artificial
  CDR3 sequence
GWKIVPTDR

SEQ ID NO: 1509 - protein, 9 aa, Artificial
  CDR3 sequence
GWKIVPTDR

SEQ ID NO: 1510 - protein, 9 aa, Artificial
  CDR3 sequence
GWKIVPTDR

SEQ ID NO: 1511 - protein, 9 aa, Artificial
  CDR3 sequence
GWKIVPMDR

SEQ ID NO: 1512 - protein, 9 aa, Artificial
  CDR3 sequence
GWKIIPTDR

SEQ ID NO: 1513 - protein, 9 aa, Artificial
  CDR3 sequence
GWKILPTDR

SEQ ID NO: 1514 - protein, 9 aa, Artificial
  CDR3 sequence
GWKILPTNR

SEQ ID NO: 1515 - protein, 9 aa, Artificial
  CDR3 sequence
GWKILPTNR

SEQ ID NO: 1516 - protein, 9 aa, Artificial
  CDR3 sequence
GWKILPTNR

SEQ ID NO: 1517 - protein, 9 aa, Artificial
  CDR3 sequence
GWKIIPTDR

SEQ ID NO: 1518 - protein, 9 aa, Artificial
  CDR3 sequence
GWKIIPTDR

SEQ ID NO: 1519 - protein, 9 aa, Artificial
  CDR3 sequence
GWKIIPTDR

SEQ ID NO: 1520 - protein, 9 aa, Artificial
  CDR3 sequence
GWKIIPTDR

SEQ ID NO: 1521 - protein, 9 aa, Artificial
  CDR3 sequence
GWKIIPTDR

SEQ ID NO: 1522 - protein, 9 aa, Artificial
  CDR3 sequence
GWKIIPTDR

SEQ ID NO: 1523 - protein, 9 aa, Artificial
  CDR3 sequence
GWKIIPTDR

SEQ ID NO: 1524 - protein, 9 aa, Artificial
  CDR3 sequence
GWKVWPTDR

SEQ ID NO: 1525 - protein, 9 aa, Artificial
  CDR3 sequence
GWKVWPTDR

SEQ ID NO: 1526 - protein, 9 aa, Artificial
  CDR3 sequence
GWKILPAER

SEQ ID NO: 1527 - protein, 9 aa, Artificial
  CDR3 sequence
GWKILPAER

SEQ ID NO: 1528 - protein, 9 aa, Artificial
  CDR3 sequence
GWKILPAER

SEQ ID NO: 1529 - protein, 9 aa, Artificial
  CDR3 sequence
GWKIHPADR

SEQ ID NO: 1530 - protein, 9 aa, Artificial
  CDR3 sequence
GWKILPAER

SEQ ID NO: 1531 - protein, 9 aa, Artificial
  CDR3 sequence
GWKIRPTIP

SEQ ID NO: 1532 - protein, 11 aa, Artificial
  CDR3 sequence
GWQSTTKNQGY

SEQ ID NO: 1533 - protein, 11 aa, Artificial
  CDR3 sequence
GWQSTTKNQGY

SEQ ID NO: 1534 - protein, 11 aa, Artificial
  CDR3 sequence
GWQSTTKSQGY

SEQ ID NO: 1535 - protein, 11 aa, Artificial
  CDR3 sequence
GWQSTTKNQNY

SEQ ID NO: 1536 - protein, 15 aa, Artificial
  CDR3 sequence
NWRDAGTTWFEKSGS

SEQ ID NO: 1537 - protein, 15 aa, Artificial
  CDR3 sequence
NWRDAGTTWFEKSGS

SEQ ID NO: 1538 - protein, 15 aa, Artificial
  CDR3 sequence
NWRDAGTTWFEKSGS

SEQ ID NO: 1539 - protein, 15 aa, Artificial
  CDR3 sequence
NWRDAGTTWFEKSGS

SEQ ID NO: 1540 - protein, 15 aa, Artificial
  CDR3 sequence
NWRDAGTTWFEKSGS

SEQ ID NO: 1541 - protein, 15 aa, Artificial
  CDR3 sequence
NWRDAGTTWFEKSGS

SEQ ID NO: 1542 - protein, 15 aa, Artificial
  CDR3 sequence
NWRDAGTTWFEKSGS

SEQ ID NO: 1543 - protein, 15 aa, Artificial
  CDR3 sequence
NWGDAGTTWFEKSGS

SEQ ID NO: 1544 - protein, 15 aa, Artificial
  CDR3 sequence
NWGDAGTTWFEKSGS

SEQ ID NO: 1545 - protein, 15 aa, Artificial
  CDR3 sequence
NWGDAGTTWFEKSGS

SEQ ID NO: 1546 - protein, 15 aa, Artificial
  CDR3 sequence
NWGDAGTTWFEKSGS

SEQ ID NO: 1547 - protein, 15 aa, Artificial
  CDR3 sequence
NWGDAGTTWFEKSGS

SEQ ID NO: 1548 - protein, 15 aa, Artificial
  CDR3 sequence
NWGDAGTTWFEKSGS

SEQ ID NO: 1549 - protein, 15 aa, Artificial
  CDR3 sequence
NWGDAGTTWFEKSGS

SEQ ID NO: 1550 - protein, 15 aa, Artificial
  CDR3 sequence
NWGDAGTTWFEKSGS

SEQ ID NO: 1551 - protein, 15 aa, Artificial
  CDR3 sequence
NWGDAGTTWFEKSGS

SEQ ID NO: 1552 - protein, 15 aa, Artificial
  CDR3 sequence
NWGDAGTTWFEKSGS

SEQ ID NO: 1553 - protein, 15 aa, Artificial
  CDR3 sequence
NWGDAGTTWFEKSGS

SEQ ID NO: 1554 - protein, 15 aa, Artificial
  CDR3 sequence
NWGDAGTTWFEKSGS

SEQ ID NO: 1555 - protein, 15 aa, Artificial
  CDR3 sequence
NWGDAGTTWFEKSGS

SEQ ID NO: 1556 - protein, 15 aa, Artificial
  CDR3 sequence
NWGDAGTTWFEKSGS

SEQ ID NO: 1557 - protein, 15 aa, Artificial
  CDR3 sequence
NWGDAGTTWFEKSGS

SEQ ID NO: 1558 - protein, 15 aa, Artificial
  CDR3 sequence
NWGDAGTTWFEKSGS

SEQ ID NO: 1559 - protein, 15 aa, Artificial
  CDR3 sequence
NWGDAGTTWFEKSGS

SEQ ID NO: 1560 - protein, 15 aa, Artificial
  CDR3 sequence
NWGDAGTTWFEKSGS

SEQ ID NO: 1561 - protein, 15 aa, Artificial
  CDR3 sequence
NWRDAGTTWFEKSGS

SEQ ID NO: 1562 - protein, 10 aa, Artificial
  CDR3 sequence
FRTAAQGTDY

SEQ ID NO: 1563 - protein, 18 aa, Artificial
  CDR3 sequence
HKTPYTTLELNRPHAFGS

SEQ ID NO: 1564 - protein, 11 aa, Artificial
  CDR3 sequence
DQRLDGSTLAY

SEQ ID NO: 1565 - protein, 15 aa, Artificial
  CDR3 sequence
ETYGSGSSLMTEYDY

SEQ ID NO: 1566 - protein, 15 aa, Artificial
  CDR3 sequence
ETYGSGSSLMSEYDY

SEQ ID NO: 1567 - protein, 15 aa, Artificial
  CDR3 sequence
ETYGSGSSLMSEYDY

SEQ ID NO: 1568 - protein, 15 aa, Artificial
  CDR3 sequence
ETYGSGSSLMSEYDY

SEQ ID NO: 1569 - protein, 15 aa, Artificial
  CDR3 sequence
ETFGSGSSLMSEYDY

SEQ ID NO: 1570 - protein, 15 aa, Artificial
  CDR3 sequence
DTYGSGSSLMNEYDY

SEQ ID NO: 1571 - protein, 15 aa, Artificial
  CDR3 sequence
ETYGSGSSLMNEYDY

SEQ ID NO: 1572 - protein, 15 aa, Artificial
  CDR3 sequence
ETYGSGSSLMNEYDY

SEQ ID NO: 1573 - protein, 15 aa, Artificial
  CDR3 sequence
ETYGSGSSLMNEYDY

SEQ ID NO: 1574 - protein, 15 aa, Artificial
  CDR3 sequence
EPYGSGSSLISEYDY

SEQ ID NO: 1575 - protein, 15 aa, Artificial
  CDR3 sequence
EPYGSGSSLISEYDY

SEQ ID NO: 1576 - protein, 15 aa, Artificial
  CDR3 sequence
EPYGSGSSLMSEYDY

SEQ ID NO: 1577 - protein, 12 aa, Artificial
  CDR3 sequence
NWKMLLGVENDY

SEQ ID NO: 1578 - protein, 14 aa, Artificial
  CDR3 sequence
KIGWLSIRGDEYEY

SEQ ID NO: 1579 - protein, 19 aa, Artificial
  CDR3 sequence
LPFVCPSGSYSDYGDEYDY

SEQ ID NO: 1580 - protein, 12 aa, Artificial
  CDR3 sequence
HVSDSDYTEYDY

SEQ ID NO: 1581 - protein, 16 aa, Artificial
  CDR3 sequence
RRSSLYTSSNVFEYDY

SEQ ID NO: 1582 - protein, 5 aa, Artificial
  CDR3 sequence
VNADY

SEQ ID NO: 1583 - protein, 5 aa, Artificial
  CDR3 sequence
VNADY

SEQ ID NO: 1584 - protein, 5 aa, Artificial
  CDR3 sequence
VNADY

SEQ ID NO: 1585 - protein, 5 aa, Artificial
  CDR3 sequence
VNADY

SEQ ID NO: 1586 - protein, 5 aa, Artificial
  CDR3 sequence
VNADY

SEQ ID NO: 1587 - protein, 5 aa, Artificial
  CDR3 sequence
VNGDI

SEQ ID NO: 1588 - protein, 5 aa, Artificial
  CDR3 sequence
VNGDI

SEQ ID NO: 1589 - protein, 5 aa, Artificial
  CDR3 sequence
VNADI

SEQ ID NO: 1590 - protein, 5 aa, Artificial
  CDR3 sequence
VNGDY

SEQ ID NO: 1591 - protein, 5 aa, Artificial
  CDR3 sequence
VNGDY

SEQ ID NO: 1592 - protein, 5 aa, Artificial
  CDR3 sequence
VNGDY

SEQ ID NO: 1593 - protein, 5 aa, Artificial
  CDR3 sequence
VNGDY

SEQ ID NO: 1594 - protein, 5 aa, Artificial
  CDR3 sequence
VNGDY

SEQ ID NO: 1595 - protein, 12 aa, Artificial
  CDR3 sequence
VWKLPRFVDNDY

SEQ ID NO: 1596 - protein, 12 aa, Artificial
  CDR3 sequence
NWKMLLGVENDY

SEQ ID NO: 1597 - protein, 12 aa, Artificial
  CDR3 sequence
NWKMLLGVENDY

SEQ ID NO: 1598 - protein, 5 aa, Artificial
  CDR3 sequence
VNRDY

SEQ ID NO: 1599 - protein, 5 aa, Artificial
  CDR3 sequence
VNRDY

SEQ ID NO: 1600 - protein, 5 aa, Artificial
  CDR3 sequence
VNRDY

SEQ ID NO: 1601 - protein, 5 aa, Artificial
  CDR3 sequence
VNRDY

SEQ ID NO: 1602 - protein, 5 aa, Artificial
  CDR3 sequence
VNRDY

SEQ ID NO: 1603 - protein, 5 aa, Artificial
  CDR3 sequence
VNRDY

SEQ ID NO: 1604 - protein, 5 aa, Artificial
  CDR3 sequence
VNRDY

SEQ ID NO: 1605 - protein, 5 aa, Artificial
  CDR3 sequence
VNRDY

SEQ ID NO: 1606 - protein, 5 aa, Artificial
  CDR3 sequence
VNRDY

SEQ ID NO: 1607 - protein, 5 aa, Artificial
  CDR3 sequence
VNRDY

SEQ ID NO: 1608 - protein, 5 aa, Artificial
  CDR3 sequence
VNRDY

SEQ ID NO: 1609 - protein, 5 aa, Artificial
  CDR3 sequence
VNRDY

SEQ ID NO: 1610 - protein, 5 aa, Artificial
  CDR3 sequence
VNRDY

SEQ ID NO: 1611 - protein, 5 aa, Artificial
  CDR3 sequence
VNREY

SEQ ID NO: 1612 - protein, 5 aa, Artificial
  CDR3 sequence
VNREY

SEQ ID NO: 1613 - protein, 5 aa, Artificial
  CDR3 sequence
VNREY

SEQ ID NO: 1614 - protein, 14 aa, Artificial
  CDR3 sequence
KPGWVARDPSQYNY

SEQ ID NO: 1615 - protein, 14 aa, Artificial
  CDR3 sequence
KPGWVARDPSEYNY

SEQ ID NO: 1616 - protein, 5 aa, Artificial
  CDR3 sequence
FNRDL

SEQ ID NO: 1617 - protein, 5 aa, Artificial
  CDR3 sequence
VNRDL

SEQ ID NO: 1618 - protein, 13 aa, Artificial
  CDR3 sequence
DANPNCGLNVWNS

SEQ ID NO: 1619 - protein, 8 aa, Artificial
  CDR3 sequence
RDYYYMPF

SEQ ID NO: 1620 - protein, 5 aa, Artificial
  CDR3 sequence
INEDQ

SEQ ID NO: 1621 - protein, 5 aa, Artificial
  CDR3 sequence
INEDQ

SEQ ID NO: 1622 - protein, 5 aa, Artificial
  CDR3 sequence
INEDQ

SEQ ID NO: 1623 - protein, 5 aa, Artificial
  CDR3 sequence
INEDQ

SEQ ID NO: 1624 - protein, 5 aa, Artificial
  CDR3 sequence
INADQ

SEQ ID NO: 1625 - protein, 5 aa, Artificial
  CDR3 sequence
INRDI

SEQ ID NO: 1626 - protein, 5 aa, Artificial
  CDR3 sequence
INHDI

SEQ ID NO: 1627 - protein, 5 aa, Artificial
  CDR3 sequence
INRDY

SEQ ID NO: 1628 - protein, 5 aa, Artificial
  CDR3 sequence
INRDY

SEQ ID NO: 1629 - protein, 5 aa, Artificial
  CDR3 sequence
INRDY

SEQ ID NO: 1630 - protein, 5 aa, Artificial
  CDR3 sequence
INGDY

SEQ ID NO: 1631 - protein, 5 aa, Artificial
  CDR3 sequence
INGDY

SEQ ID NO: 1632 - protein, 5 aa, Artificial
  CDR3 sequence
TNGDY

SEQ ID NO: 1633 - protein, 12 aa, Artificial
  CDR3 sequence
DISTFGWGPFDY

SEQ ID NO: 1634 - protein, 9 aa, Artificial
  CDR3 sequence
RWDIVGAIW

SEQ ID NO: 1635 - protein, 9 aa, Artificial
  CDR3 sequence
RWDIVGAIW

SEQ ID NO: 1636 - protein, 9 aa, Artificial
  CDR3 sequence
RWLEIGAEY

SEQ ID NO: 1637 - protein, 9 aa, Artificial
  CDR3 sequence
SWSYPGLTY

SEQ ID NO: 1638 - protein, 9 aa, Artificial
  CDR3 sequence
VWRAIGRTY

SEQ ID NO: 1639 - protein, 10 aa, Artificial
  CDR3 sequence
DRRSYNGRQY

SEQ ID NO: 1640 - protein, 14 aa, Artificial
  CDR3 sequence
GGREYSGVYYYREY

SEQ ID NO: 1641 - protein, 13 aa, Artificial
  CDR3 sequence
RPSDTTWSESSAS

SEQ ID NO: 1642 - protein, 12 aa, Artificial
  CDR3 sequence
DLGNSGRGPYTN

SEQ ID NO: 1643 - protein, 13 aa, Artificial
  CDR3 sequence
DCGVPGFGWTFSS

SEQ ID NO: 1644 - protein, 9 aa, Artificial
  CDR3 sequence
KQLPYLQNF

SEQ ID NO: 1645 - protein, 9 aa, Artificial
  CDR3 sequence
KQLPYLQNF

SEQ ID NO: 1646 - protein, 7 aa, Artificial
  CDR3 sequence
HRWGLNY

SEQ ID NO: 1647 - protein, 12 aa, Artificial
  CDR3 sequence
ARSSSSYYDFGS

SEQ ID NO: 1648 - protein, 12 aa, Artificial
  CDR3 sequence
ARSSSSYYDFGS

SEQ ID NO: 1649 - protein, 13 aa, Artificial
  CDR3 sequence
DRGSGTCYADFGS

SEQ ID NO: 1650 - protein, 11 aa, Artificial
  CDR3 sequence
GWGPAVTSIPV

SEQ ID NO: 1651 - protein, 5 aa, Artificial
  CDR3 sequence
INRDI

SEQ ID NO: 1652 - protein, 5 aa, Artificial
  CDR3 sequence
INRDI

SEQ ID NO: 1653 - protein, 5 aa, Artificial
  CDR3 sequence
INRDI

SEQ ID NO: 1654 - protein, 5 aa, Artificial
  CDR3 sequence
INRDI

SEQ ID NO: 1655 - protein, 15 aa, Artificial
  CDR3 sequence
SRDYSRSRDPTSYDR

SEQ ID NO: 1656 - protein, 13 aa, Artificial
  CDR3 sequence
PRGSSLYLLEYDY

SEQ ID NO: 1657 - protein, 13 aa, Artificial
  CDR3 sequence
DFYLATLAHEYDY

SEQ ID NO: 1658 - protein, 13 aa, Artificial
  CDR3 sequence
DFYVSTLAHEYDY

SEQ ID NO: 1659 - protein, 13 aa, Artificial
  CDR3 sequence
DFYVSTLAHEYDY

SEQ ID NO: 1660 - protein, 13 aa, Artificial
  CDR3 sequence
DFYVSTLAHEYDY

SEQ ID NO: 1661 - protein, 14 aa, Artificial
  CDR3 sequence
DTFTLSTLSHEYDY

SEQ ID NO: 1662 - protein, 13 aa, Artificial
  CDR3 sequence
DLIVATLPGEYDY

SEQ ID NO: 1663 - protein, 13 aa, Artificial
  CDR3 sequence
DEILATLPHEYDY

SEQ ID NO: 1664 - protein, 15 aa, Artificial
  CDR3 sequence
DAYTVIATLPHEYDY

SEQ ID NO: 1665 - protein, 14 aa, Artificial
  CDR3 sequence
KHSTVAGLTHEYDY

SEQ ID NO: 1666 - protein, 12 aa, Artificial
  CDR3 sequence
VYVSTWGNGYDY

SEQ ID NO: 1667 - protein, 17 aa, Artificial
  CDR3 sequence
RRSGYYSLSTSPHQYAY

SEQ ID NO: 1668 - protein, 16 aa, Artificial
  CDR3 sequence
RVNYAAYSRLEHDYHY

SEQ ID NO: 1669 - protein, 16 aa, Artificial
  CDR3 sequence
RVNYAAYSRLEHDYHY

SEQ ID NO: 1670 - protein, 8 aa, Artificial
  CDR3 sequence
NRAGIYEY

SEQ ID NO: 1671 - protein, 14 aa, Artificial
  CDR3 sequence
RLFMATPNQGQYYY

SEQ ID NO: 1672 - protein, 14 aa, Artificial
  CDR3 sequence
RPSYSTNNVKSYRY

SEQ ID NO: 1673 - protein, 14 aa, Artificial
  CDR3 sequence
RPAVVHTRKESYPY

SEQ ID NO: 1674 - protein, 16 aa, Artificial
  CDR3 sequence
RINYSVLTTTSSSYHY

SEQ ID NO: 1675 - protein, 16 aa, Artificial
  CDR3 sequence
DFRSTWLSSSGSSYTY

SEQ ID NO: 1676 - protein, 13 aa, Artificial
  CDR3 sequence
RRIVNVEGAYRDY

SEQ ID NO: 1677 - protein, 13 aa, Artificial
  CDR3 sequence
KVVVAVEGAKYDY

SEQ ID NO: 1678 - protein, 15 aa, Artificial
  CDR3 sequence
CRISWCAGAESDYGY

SEQ ID NO: 1679 - protein, 18 aa, Artificial
  CDR3 sequence
DSITDRRSVAVAHTSYYY

SEQ ID NO: 1680 - protein, 14 aa, Artificial
  CDR3 sequence
RLSSVAVASTRYDY

SEQ ID NO: 1681 - protein, 16 aa, Artificial
  CDR3 sequence
NRQSGVASENLRLYTY

SEQ ID NO: 1682 - protein, 14 aa, Artificial
  CDR3 sequence
DKQSGVSVNPKYAY

SEQ ID NO: 1683 - protein, 10 aa, Artificial
  CDR3 sequence
QTLGRSLYDY

SEQ ID NO: 1684 - protein, 17 aa, Artificial
  CDR3 sequence
SRYSGGVATARRSEYHY

SEQ ID NO: 1685 - protein, 16 aa, Artificial
  CDR3 sequence
VATYSRNVGSVRNYDY

SEQ ID NO: 1686 - protein, 17 aa, Artificial
  CDR3 sequence
SQPLNYYTYYDARRYDY

SEQ ID NO: 1687 - protein, 16 aa, Artificial
  CDR3 sequence
TPVYYQRYYDQNAYDY

SEQ ID NO: 1688 - protein, 10 aa, Artificial
  CDR3 sequence
KYYSYYAYDY

SEQ ID NO: 1689 - protein, 16 aa, Artificial
  CDR3 sequence
SPVYYIDYSSQYKYGY

SEQ ID NO: 1690 - protein, 16 aa, Artificial
  CDR3 sequence
QIYYRTNYYSQNAYDY

SEQ ID NO: 1691 - protein, 16 aa, Artificial
  CDR3 sequence
QIYYRTNYYSQNNYDY

SEQ ID NO: 1692 - protein, 16 aa, Artificial
  CDR3 sequence
QIYYRTNYYSQNVYDY

SEQ ID NO: 1693 - protein, 16 aa, Artificial
  CDR3 sequence
QIYYRTNYYSQNEYDY

SEQ ID NO: 1694 - protein, 16 aa, Artificial
  CDR3 sequence
QIYYRTNYSSQSNYDY

SEQ ID NO: 1695 - protein, 16 aa, Artificial
  CDR3 sequence
ATAYRTNYSSRDKYDY

SEQ ID NO: 1696 - protein, 13 aa, Artificial
  CDR3 sequence
YLSFYSDYEVYDY

SEQ ID NO: 1697 - protein, 11 aa, Artificial
  CDR3 sequence
DPTYGSGRWTY

SEQ ID NO: 1698 - protein, 19 aa, Artificial
  CDR3 sequence
SVTYYSGSHAYTQEGGYAR

SEQ ID NO: 1699 - protein, 17 aa, Artificial
  CDR3 sequence
RQPYASGSHYSSTQYTY

SEQ ID NO: 1700 - protein, 10 aa, Artificial
  CDR3 sequence
LYRGRSVYDD

SEQ ID NO: 1701 - protein, 18 aa, Artificial
  CDR3 sequence
SSYGSTYYSQGRAYYYDY

SEQ ID NO: 1702 - protein, 15 aa, Artificial
  CDR3 sequence
SPYGPLYRSTHYYDY

SEQ ID NO: 1703 - protein, 18 aa, Artificial
  CDR3 sequence
TTYYSGSYISTLSTSYNY

SEQ ID NO: 1704 - protein, 3 aa, Artificial
  CDR3 sequence
GSY

SEQ ID NO: 1705 - protein, 3 aa, Artificial
  CDR3 sequence
GSY

SEQ ID NO: 1706 - protein, 18 aa, Artificial
  CDR3 sequence
RDSSTLDSTYYVGGSYNY

SEQ ID NO: 1707 - protein, 3 aa, Artificial
  CDR3 sequence
GSY

SEQ ID NO: 1708 - protein, 16 aa, Artificial
  CDR3 sequence
RMYGSDWLPRPEDFDS

SEQ ID NO: 1709 - protein, 12 aa, Artificial
  CDR3 sequence
DVSPSYGSRWYG

SEQ ID NO: 1710 - protein, 18 aa, Artificial
  CDR3 sequence
RREYSTIYTARYPGEYVY

SEQ ID NO: 1711 - protein, 8 aa, Artificial
  CDR3 sequence
RERGIYDS

SEQ ID NO: 1712 - protein, 16 aa, Artificial
  CDR3 sequence
DDYLGGDNWYLGPYDS

SEQ ID NO: 1713 - protein, 15 aa, Artificial
  CDR3 sequence
RKTYRSLTYYGEYDS

SEQ ID NO: 1714 - protein, 17 aa, Artificial
  CDR3 sequence
DRLLYYSSGYYQTSVDV

SEQ ID NO: 1715 - protein, 17 aa, Artificial
  CDR3 sequence
DRFLYYSAGRYDTGSDI

SEQ ID NO: 1716 - protein, 17 aa, Artificial
  CDR3 sequence
DRVLYYSDSRYYTGSNY

SEQ ID NO: 1717 - protein, 19 aa, Artificial
  CDR3 sequence
DRALYRNYSDGRYYTGYDY

SEQ ID NO: 1718 - protein, 7 aa, Artificial
  CDR3 sequence
RILSRNY

SEQ ID NO: 1719 - protein, 18 aa, Artificial
  CDR3 sequence
SRRFYSGLYYYTDDAYEY

SEQ ID NO: 1720 - protein, 18 aa, Artificial
  CDR3 sequence
SRRFYSGLVYYSVDAYEN

SEQ ID NO: 1721 - protein, 18 aa, Artificial
  CDR3 sequence
TKRYYSIKYYSTVEDYEY

SEQ ID NO: 1722 - protein, 19 aa, Artificial
  CDR3 sequence
NRYYCSTYGCLSTPRQYDY

SEQ ID NO: 1723 - protein, 12 aa, Artificial
  CDR3 sequence
RVYTGTYGGRNY

SEQ ID NO: 1724 - protein, 9 aa, Artificial
  CDR3 sequence
GYSLPAFDS

SEQ ID NO: 1725 - protein, 9 aa, Artificial
  CDR3 sequence
GIDLYTFHY

SEQ ID NO: 1726 - protein, 9 aa, Artificial
  CDR3 sequence
GIDLYTFDY

SEQ ID NO: 1727 - protein, 17 aa, Artificial
  CDR3 sequence
NSDSGFDSYSVWAAYEY

SEQ ID NO: 1728 - protein, 10 aa, Artificial
  CDR3 sequence
LLTVWDTYKY

SEQ ID NO: 1729 - protein, 17 aa, Artificial
  CDR3 sequence
TNRWYTGVYDLPSRYEY

SEQ ID NO: 1730 - protein, 17 aa, Artificial
  CDR3 sequence
TNRWFSAVYDLPSRYTY

SEQ ID NO: 1731 - protein, 6 aa, Artificial
  CDR3 sequence
DLPSRL

SEQ ID NO: 1732 - protein, 17 aa, Artificial
  CDR3 sequence
TSRWYSAVYDLPTRYDY

SEQ ID NO: 1733 - protein, 16 aa, Artificial
  CDR3 sequence
DRSYSIDYRHPDSYSY

SEQ ID NO: 1734 - protein, 15 aa, Artificial
  CDR3 sequence
DPLLFYGVGSADVDY

SEQ ID NO: 1735 - protein, 9 aa, Artificial
  CDR3 sequence
ISGLVQRDY

SEQ ID NO: 1736 - protein, 15 aa, Artificial
  CDR3 sequence
GGHLLGYDVQWEPDY

SEQ ID NO: 1737 - protein, 16 aa, Artificial
  CDR3 sequence
HKRTYELGAHSTDFGS

SEQ ID NO: 1738 - protein, 17 aa, Artificial
  CDR3 sequence
AVFVDSGDFSVCRGVGY

SEQ ID NO: 1739 - protein, 12 aa, Artificial
  CDR3 sequence
LRSWPRGVDSGS

SEQ ID NO: 1740 - protein, 14 aa, Artificial
  CDR3 sequence
DVIYKNIGSGSFDY

SEQ ID NO: 1741 - protein, 14 aa, Artificial
  CDR3 sequence
DVIYKNIGSGSFDY

SEQ ID NO: 1742 - protein, 14 aa, Artificial
  CDR3 sequence
SKWYGGFGDTDIEY

SEQ ID NO: 1743 - protein, 14 aa, Artificial
  CDR3 sequence
SKWYGGFGDTDIEY

SEQ ID NO: 1744 - protein, 6 aa, Artificial
  CDR3 sequence
DGPFGN

SEQ ID NO: 1745 - protein, 16 aa, Artificial
  CDR3 sequence
SRHSGNTLSFSLKYDY

SEQ ID NO: 1746 - protein, 16 aa, Artificial
  CDR3 sequence
RRWSGTLSLFDNEYYY

SEQ ID NO: 1747 - protein, 12 aa, Artificial
  CDR3 sequence
DNYRDSYLEYDY

SEQ ID NO: 1748 - protein, 16 aa, Artificial
  CDR3 sequence
SWDHGDYVDGGFFYDY

SEQ ID NO: 1749 - protein, 15 aa, Artificial
  CDR3 sequence
AGSAGPPSIDRQYDY

SEQ ID NO: 1750 - protein, 10 aa, Artificial
  CDR3 sequence
DVRDSIWRSY

SEQ ID NO: 1751 - protein, 11 aa, Artificial
  CDR3 sequence
GWGATQAQSGF

SEQ ID NO: 1752 - protein, 11 aa, Artificial
  CDR3 sequence
GWGATQAQHGF

SEQ ID NO: 1753 - protein, 12 aa, Artificial
  CDR3 sequence
SSSLATISQPSS

SEQ ID NO: 1754 - protein, 10 aa, Artificial
  CDR3 sequence
KAVTSRDHEY

SEQ ID NO: 1755 - protein, 19 aa, Artificial
  CDR3 sequence
NSDEFYSGTLKLQSRMVEY

SEQ ID NO: 1756 - protein, 9 aa, Artificial
  CDR3 sequence
GWKTDEYVK

SEQ ID NO: 1757 - protein, 11 aa, Artificial
  CDR3 sequence
GWVTPSYEYGN

SEQ ID NO: 1758 - protein, 19 aa, Artificial
  CDR3 sequence
DQKYGMSYSRLWLVSEYEY

SEQ ID NO: 1759 - protein, 7 aa, Artificial
  CDR3 sequence
GWGDSAY

SEQ ID NO: 1760 - protein, 15 aa, Artificial
  CDR3 sequence
NGIESYGWGNRHFNY

SEQ ID NO: 1761 - protein, 10 aa, Artificial
  CDR3 sequence
GGWGTGRYNY

SEQ ID NO: 1762 - protein, 12 aa, Artificial
  CDR3 sequence
GWGTAPLSTSVY

SEQ ID NO: 1763 - protein, 15 aa, Artificial
  CDR3 sequence
DRFNTIANLPGEYDY

SEQ ID NO: 1764 - protein, 15 aa, Artificial
  CDR3 sequence
ETFNSISNLPGEYDY

SEQ ID NO: 1765 - protein, 15 aa, Artificial
  CDR3 sequence
DHFTFMSNLPSEYDY

SEQ ID NO: 1766 - protein, 15 aa, Artificial
  CDR3 sequence
RKIYRSLSYYGDYDS

SEQ ID NO: 1767 - protein, 14 aa, Artificial
  CDR3 sequence
RLTMATPNQSQYYY

SEQ ID NO: 1768 - protein, 7 aa, Artificial
  CDR3 sequence
SGIGTDN

SEQ ID NO: 1769 - protein, 7 aa, Artificial
  CDR3 sequence
SGIGTDN

SEQ ID NO: 1770 - protein, 14 aa, Artificial
  CDR3 sequence
DILYKTDIYYRNDF

SEQ ID NO: 1771 - protein, 22 aa, Artificial
  CDR3 sequence
LPYTICPVVVKKGAVYYGVDDY

SEQ ID NO: 1772 - protein, 11 aa, Artificial
  CDR3 sequence
GFSDRSFAVTH

SEQ ID NO: 1773 - protein, 15 aa, Artificial
  CDR3 sequence
DFRLARLRVADDYDY

SEQ ID NO: 1774 - protein, 20 aa, Artificial
  CDR3 sequence
LRTDYSINWANCQRDSLYGY

SEQ ID NO: 1775 - protein, 11 aa, Artificial
  CDR3 sequence
GGWTRTHPFDY

SEQ ID NO: 1776 - protein, 11 aa, Artificial
  FR4 sequence
RGHGTQVTVSS

SEQ ID NO: 1777 - protein, 11 aa, Artificial
  FR4 sequence
MGHGTQVTVSS

SEQ ID NO: 1778 - protein, 11 aa, Artificial
  FR4 sequence
GGHGTQVTVSS

SEQ ID NO: 1779 - protein, 11 aa, Artificial
  FR4 sequence
GGHGTQVTVSS

SEQ ID NO: 1780 - protein, 11 aa, Artificial
  FR4 sequence
GGHGTQVTVSS

SEQ ID NO: 1781 - protein, 11 aa, Artificial
  FR4 sequence
RGHGTQVTVSS

SEQ ID NO: 1782 - protein, 11 aa, Artificial
  FR4 sequence
TGHGTQVTVSS

SEQ ID NO: 1783 - protein, 11 aa, Artificial
  FR4 sequence
TGHGTQVTVSS

SEQ ID NO: 1784 - protein, 11 aa, Artificial
  FR4 sequence
GGHGTQVTVSS

SEQ ID NO: 1785 - protein, 11 aa, Artificial
  FR4 sequence
GSHGTQVTVSS

SEQ ID NO: 1786 - protein, 11 aa, Artificial
  FR4 sequence
RGHGTQVTVSS

SEQ ID NO: 1787 - protein, 11 aa, Artificial
  FR4 sequence
RGHGTQVTVSS

SEQ ID NO: 1788 - protein, 11 aa, Artificial
  FR4 sequence
RGHGTQVTVSS

SEQ ID NO: 1789 - protein, 11 aa, Artificial
  FR4 sequence
GSHGTQVTVSS

SEQ ID NO: 1790 - protein, 11 aa, Artificial
  FR4 sequence
GSHGTQVTVSS

SEQ ID NO: 1791 - protein, 11 aa, Artificial
  FR4 sequence
GSHGTQVTVSS

SEQ ID NO: 1792 - protein, 11 aa, Artificial
  FR4 sequence
RGHGTQVTVSS

SEQ ID NO: 1793 - protein, 11 aa, Artificial
  FR4 sequence
RGHGTQVTVSS

SEQ ID NO: 1794 - protein, 11 aa, Artificial
  FR4 sequence
RGHGTQVTVSS

SEQ ID NO: 1795 - protein, 11 aa, Artificial
  FR4 sequence
RGHGTQVTVSS

SEQ ID NO: 1796 - protein, 11 aa, Artificial
  FR4 sequence
RGHGTQVTVSS

SEQ ID NO: 1797 - protein, 11 aa, Artificial
  FR4 sequence
RGHGTQVTVSS

SEQ ID NO: 1798 - protein, 11 aa, Artificial
  FR4 sequence
RGHGTQVTVSS

SEQ ID NO: 1799 - protein, 11 aa, Artificial
  FR4 sequence
GTHGTQVTVSS

SEQ ID NO: 1800 - protein, 11 aa, Artificial
  FR4 sequence
GTHGTQVTVSS

SEQ ID NO: 1801 - protein, 11 aa, Artificial
  FR4 sequence
RGHGTQVTVSS

SEQ ID NO: 1802 - protein, 11 aa, Artificial
  FR4 sequence
RGHGTPVTVSS

SEQ ID NO: 1803 - protein, 11 aa, Artificial
  FR4 sequence
RGHGTQVTVSS

SEQ ID NO: 1804 - protein, 11 aa, Artificial
  FR4 sequence
GGHGTQVTVSS

SEQ ID NO: 1805 - protein, 11 aa, Artificial
  FR4 sequence
RGHGTQVTVSS

SEQ ID NO: 1806 - protein, 11 aa, Artificial
  FR4 sequence
MGHGTQVTVSS

SEQ ID NO: 1807 - protein, 11 aa, Artificial
  FR4 sequence
WGQGTQVTVSS

SEQ ID NO: 1808 - protein, 11 aa, Artificial
  FR4 sequence
WGQGTQVTVSS

SEQ ID NO: 1809 - protein, 11 aa, Artificial
  FR4 sequence
WGQGTQVTVSS

SEQ ID NO: 1810 - protein, 11 aa, Artificial
  FR4 sequence
WGQGTQVTVSS

SEQ ID NO: 1811 - protein, 11 aa, Artificial
  FR4 sequence
AGQGTQVTVSS

SEQ ID NO: 1812 - protein, 11 aa, Artificial
  FR4 sequence
AGQGTQVTVSS

SEQ ID NO: 1813 - protein, 11 aa, Artificial
  FR4 sequence
AGQGTQVTVSS

SEQ ID NO: 1814 - protein, 11 aa, Artificial
  FR4 sequence
AGQGTQVTVSS

SEQ ID NO: 1815 - protein, 11 aa, Artificial
  FR4 sequence
AGQGTQVTVSS

SEQ ID NO: 1816 - protein, 11 aa, Artificial
  FR4 sequence
AGQGTQVTVSS

SEQ ID NO: 1817 - protein, 11 aa, Artificial
  FR4 sequence
AGQGTQVTVSS

SEQ ID NO: 1818 - protein, 11 aa, Artificial
  FR4 sequence
AGPGTQVTVSS

SEQ ID NO: 1819 - protein, 11 aa, Artificial
  FR4 sequence
AGQGTQVTVSS

SEQ ID NO: 1820 - protein, 11 aa, Artificial
  FR4 sequence
AGQGTQVTVSS

SEQ ID NO: 1821 - protein, 11 aa, Artificial
  FR4 sequence
AGQGTQVTVSS

SEQ ID NO: 1822 - protein, 11 aa, Artificial
  FR4 sequence
AGPGTQVTVSS

SEQ ID NO: 1823 - protein, 11 aa, Artificial
  FR4 sequence
AGQGTQVTVSS

SEQ ID NO: 1824 - protein, 11 aa, Artificial
  FR4 sequence
AGQGTQVTVSS

SEQ ID NO: 1825 - protein, 11 aa, Artificial
  FR4 sequence
AGQGTQVTVSS

SEQ ID NO: 1826 - protein, 11 aa, Artificial
  FR4 sequence
AGQGTQVTVSS

SEQ ID NO: 1827 - protein, 11 aa, Artificial
  FR4 sequence
AGPGTQVTVSS

SEQ ID NO: 1828 - protein, 11 aa, Artificial
  FR4 sequence
AGQGTQVTVSS

SEQ ID NO: 1829 - protein, 11 aa, Artificial
  FR4 sequence
AGQGTQVTVSS

SEQ ID NO: 1830 - protein, 11 aa, Artificial
  FR4 sequence
AGQGTQVTVSS

SEQ ID NO: 1831 - protein, 11 aa, Artificial
  FR4 sequence
AGQGTQVTVSS

SEQ ID NO: 1832 - protein, 11 aa, Artificial
  FR4 sequence
AGQGTQVTVSS

SEQ ID NO: 1833 - protein, 11 aa, Artificial
  FR4 sequence
AGQGTQVTVSS

SEQ ID NO: 1834 - protein, 11 aa, Artificial
  FR4 sequence
AGQGTQVTVSS

SEQ ID NO: 1835 - protein, 11 aa, Artificial
  FR4 sequence
AGPGTQVTVSS

SEQ ID NO: 1836 - protein, 11 aa, Artificial
  FR4 sequence
AGQGTQVTVSS

SEQ ID NO: 1837 - protein, 11 aa, Artificial
  FR4 sequence
WGQGTQVTVSS

SEQ ID NO: 1838 - protein, 11 aa, Artificial
  FR4 sequence
WGQGTQVTVSS

SEQ ID NO: 1839 - protein, 11 aa, Artificial
  FR4 sequence
WGQGTQVTVSS

SEQ ID NO: 1840 - protein, 11 aa, Artificial
  FR4 sequence
WGQGTQVTVSS

SEQ ID NO: 1841 - protein, 11 aa, Artificial
  FR4 sequence
WGQGTQVTVSS

SEQ ID NO: 1842 - protein, 11 aa, Artificial
  FR4 sequence
WGQGTQVTVSS

SEQ ID NO: 1843 - protein, 11 aa, Artificial
  FR4 sequence
WGQGTQVTVSS

SEQ ID NO: 1844 - protein, 11 aa, Artificial
  FR4 sequence
WGQGTQVTVSS

SEQ ID NO: 1845 - protein, 11 aa, Artificial
  FR4 sequence
WGQGTQVTVSS

SEQ ID NO: 1846 - protein, 11 aa, Artificial
  FR4 sequence
WGQGTQVTVSS

SEQ ID NO: 1847 - protein, 11 aa, Artificial
  FR4 sequence
WGQGTQVTVSS

SEQ ID NO: 1848 - protein, 11 aa, Artificial
  FR4 sequence
WGQGTQVTVSS

SEQ ID NO: 1849 - protein, 11 aa, Artificial
  FR4 sequence
WGHGTQVTVSS

SEQ ID NO: 1850 - protein, 11 aa, Artificial
  FR4 sequence
WGHGTQVTVSS

SEQ ID NO: 1851 - protein, 11 aa, Artificial
  FR4 sequence
WGHGTQVTVSS

SEQ ID NO: 1852 - protein, 11 aa, Artificial
  FR4 sequence
WGQGTQVTVSS

SEQ ID NO: 1853 - protein, 11 aa, Artificial
  FR4 sequence
WGQGTQVTVSS

SEQ ID NO: 1854 - protein, 11 aa, Artificial
  FR4 sequence
WGQGTQVTVSS

SEQ ID NO: 1855 - protein, 11 aa, Artificial
  FR4 sequence
WGQGTQVTVSS

SEQ ID NO: 1856 - protein, 11 aa, Artificial
  FR4 sequence
WGQGTQVTVSS

SEQ ID NO: 1857 - protein, 11 aa, Artificial
  FR4 sequence
WGQGTQVTVSS

SEQ ID NO: 1858 - protein, 11 aa, Artificial
  FR4 sequence
WGQGTQVTVSS

SEQ ID NO: 1859 - protein, 11 aa, Artificial
  FR4 sequence
WGQGTPVTVSS

SEQ ID NO: 1860 - protein, 11 aa, Artificial
  FR4 sequence
WGQGTQVTVSS

SEQ ID NO: 1861 - protein, 11 aa, Artificial
  FR4 sequence
WGQGTQVTVSS

SEQ ID NO: 1862 - protein, 11 aa, Artificial
  FR4 sequence
WGQGTQVTVSS

SEQ ID NO: 1863 - protein, 11 aa, Artificial
  FR4 sequence
WGQGTPVTVSS

SEQ ID NO: 1864 - protein, 11 aa, Artificial
  FR4 sequence
WGQGTQVTVSS

SEQ ID NO: 1865 - protein, 11 aa, Artificial
  FR4 sequence
WGQGTQVTVSS

SEQ ID NO: 1866 - protein, 11 aa, Artificial
  FR4 sequence
WGQGTQVTVSS

SEQ ID NO: 1867 - protein, 11 aa, Artificial
  FR4 sequence
WGQGTQVTVSS

SEQ ID NO: 1868 - protein, 11 aa, Artificial
  FR4 sequence
WGQGTQVTVSS

SEQ ID NO: 1869 - protein, 11 aa, Artificial
  FR4 sequence
WGQGTQVTVSS

SEQ ID NO: 1870 - protein, 11 aa, Artificial
  FR4 sequence
WGQGTQVTVSS

SEQ ID NO: 1871 - protein, 11 aa, Artificial
  FR4 sequence
WGQGTQVTVSS

SEQ ID NO: 1872 - protein, 11 aa, Artificial
  FR4 sequence
WGQGTQVTVSS

SEQ ID NO: 1873 - protein, 11 aa, Artificial
  FR4 sequence
WGQGTQVTVSS

SEQ ID NO: 1874 - protein, 11 aa, Artificial
  FR4 sequence
WGQGTQVTVSS

SEQ ID NO: 1875 - protein, 11 aa, Artificial
  FR4 sequence
WGQGTQVTVSS

SEQ ID NO: 1876 - protein, 11 aa, Artificial
  FR4 sequence
WGQGTQVTVSS

SEQ ID NO: 1877 - protein, 11 aa, Artificial
  FR4 sequence
WGQGTQVTVSS

SEQ ID NO: 1878 - protein, 11 aa, Artificial
  FR4 sequence
WGQGTQVTVSS

SEQ ID NO: 1879 - protein, 11 aa, Artificial
  FR4 sequence
WGQGTQVTVSS

SEQ ID NO: 1880 - protein, 11 aa, Artificial
  FR4 sequence
WGQGTQVTVSS

SEQ ID NO: 1881 - protein, 11 aa, Artificial
  FR4 sequence
WGQGTQVTVSS

SEQ ID NO: 1882 - protein, 11 aa, Artificial
  FR4 sequence
WGQGTQVTVSS

SEQ ID NO: 1883 - protein, 11 aa, Artificial
  FR4 sequence
WGQGTQVTVSS

SEQ ID NO: 1884 - protein, 11 aa, Artificial
  FR4 sequence
WGQGTQVTVSS

SEQ ID NO: 1885 - protein, 11 aa, Artificial
  FR4 sequence
WGQGTQVTVSS

SEQ ID NO: 1886 - protein, 11 aa, Artificial
  FR4 sequence
WGQGTQVTVSS

SEQ ID NO: 1887 - protein, 11 aa, Artificial
  FR4 sequence
WGQGTQVTVSS

SEQ ID NO: 1888 - protein, 11 aa, Artificial
  FR4 sequence
WGQGTQVTVSS

SEQ ID NO: 1889 - protein, 11 aa, Artificial
  FR4 sequence
WGQGTQVTVSS

SEQ ID NO: 1890 - protein, 11 aa, Artificial
  FR4 sequence
WGQGTQVTVSS

SEQ ID NO: 1891 - protein, 11 aa, Artificial
  FR4 sequence
WGQGTQVTVSS

SEQ ID NO: 1892 - protein, 11 aa, Artificial
  FR4 sequence
WGQGTQVTVSS

SEQ ID NO: 1893 - protein, 11 aa, Artificial
  FR4 sequence
WGQGTQVTVSS

SEQ ID NO: 1894 - protein, 11 aa, Artificial
  FR4 sequence
WGQGTQVTVSS

SEQ ID NO: 1895 - protein, 11 aa, Artificial
  FR4 sequence
WGQGTQVTVSS

SEQ ID NO: 1896 - protein, 11 aa, Artificial
  FR4 sequence
WGQGTQVTVSS

SEQ ID NO: 1897 - protein, 11 aa, Artificial
  FR4 sequence
WGQGTQVTVSS

SEQ ID NO: 1898 - protein, 11 aa, Artificial
  FR4 sequence
WGQGTQVTVSS

SEQ ID NO: 1899 - protein, 11 aa, Artificial
  FR4 sequence
WGQGTQVTVSS

SEQ ID NO: 1900 - protein, 11 aa, Artificial
  FR4 sequence
WGQGSQVTVSS

SEQ ID NO: 1901 - protein, 11 aa, Artificial
  FR4 sequence
WGRGSQVTVSS

SEQ ID NO: 1902 - protein, 11 aa, Artificial
  FR4 sequence
WGQGTQVTVSS

SEQ ID NO: 1903 - protein, 11 aa, Artificial
  FR4 sequence
WGQGTQVTVSS

SEQ ID NO: 1904 - protein, 11 aa, Artificial
  FR4 sequence
WGQGTQVTVSS

SEQ ID NO: 1905 - protein, 11 aa, Artificial
  FR4 sequence
WGQGTQVTVSS

SEQ ID NO: 1906 - protein, 11 aa, Artificial
  FR4 sequence
WGQGTQVTVSS

SEQ ID NO: 1907 - protein, 11 aa, Artificial
  FR4 sequence
WGQGTQVTVSS

SEQ ID NO: 1908 - protein, 11 aa, Artificial
  FR4 sequence
WGQGTQVTVSS

SEQ ID NO: 1909 - protein, 11 aa, Artificial
  FR4 sequence
WGQGTQVTVSS

SEQ ID NO: 1910 - protein, 11 aa, Artificial
  FR4 sequence
WGQGTQVTVSS

SEQ ID NO: 1911 - protein, 11 aa, Artificial
  FR4 sequence
WGQGTQVTVSS

SEQ ID NO: 1912 - protein, 11 aa, Artificial
  FR4 sequence
WGKGTLVTVSS

SEQ ID NO: 1913 - protein, 11 aa, Artificial
  FR4 sequence
WGQGTQVTVSS

SEQ ID NO: 1914 - protein, 11 aa, Artificial
  FR4 sequence
WGQGTQVTVSS

SEQ ID NO: 1915 - protein, 11 aa, Artificial
  FR4 sequence
WGQGTQVTVSS

SEQ ID NO: 1916 - protein, 11 aa, Artificial
  FR4 sequence
WGQGTQVTVSS

SEQ ID NO: 1917 - protein, 11 aa, Artificial
  FR4 sequence
WGQGTQVTVSS

SEQ ID NO: 1918 - protein, 11 aa, Artificial
  FR4 sequence
WGQGTQVTVSS

SEQ ID NO: 1919 - protein, 11 aa, Artificial
  FR4 sequence
WGQGTQVTVSS

SEQ ID NO: 1920 - protein, 11 aa, Artificial
  FR4 sequence
WGQGTQVTVSS

SEQ ID NO: 1921 - protein, 11 aa, Artificial
  FR4 sequence
WGQGTQVTVSS

SEQ ID NO: 1922 - protein, 11 aa, Artificial
  FR4 sequence
WGQGTQVTVSS

SEQ ID NO: 1923 - protein, 11 aa, Artificial
  FR4 sequence
WGQGTQVTVSS

SEQ ID NO: 1924 - protein, 11 aa, Artificial
  FR4 sequence
WGQGTQVTVSS

SEQ ID NO: 1925 - protein, 11 aa, Artificial
  FR4 sequence
ATLGTQVTVSS

SEQ ID NO: 1926 - protein, 11 aa, Artificial
  FR4 sequence
WGQGSQVTVSS

SEQ ID NO: 1927 - protein, 11 aa, Artificial
  FR4 sequence
WGQGSQVTVSS

SEQ ID NO: 1928 - protein, 11 aa, Artificial
  FR4 sequence
WGQGSQVTVSS

SEQ ID NO: 1929 - protein, 11 aa, Artificial
  FR4 sequence
WGQGSQVTVSS

SEQ ID NO: 1930 - protein, 11 aa, Artificial
  FR4 sequence
WGQGTQVTVSS

SEQ ID NO: 1931 - protein, 11 aa, Artificial
  FR4 sequence
WGQGTQVTVSS

SEQ ID NO: 1932 - protein, 11 aa, Artificial
  FR4 sequence
WGQGTQVTVSS

SEQ ID NO: 1933 - protein, 11 aa, Artificial
  FR4 sequence
WGQGTQVTVSS

SEQ ID NO: 1934 - protein, 11 aa, Artificial
  FR4 sequence
WGQGTQVTVSS

SEQ ID NO: 1935 - protein, 11 aa, Artificial
  FR4 sequence
WGQGTQVTVSS

SEQ ID NO: 1936 - protein, 11 aa, Artificial
  FR4 sequence
WGQGTQVTVSS

SEQ ID NO: 1937 - protein, 11 aa, Artificial
  FR4 sequence
WGQGTQVTVSS

SEQ ID NO: 1938 - protein, 11 aa, Artificial
  FR4 sequence
WGQGTQVTVSS

SEQ ID NO: 1939 - protein, 11 aa, Artificial
  FR4 sequence
WGQGTQVTVSS

SEQ ID NO: 1940 - protein, 11 aa, Artificial
  FR4 sequence
WGQGTQVTVSS

SEQ ID NO: 1941 - protein, 11 aa, Artificial
  FR4 sequence
WGQGTQVTVSS

SEQ ID NO: 1942 - protein, 11 aa, Artificial
  FR4 sequence
WGQGTQVTVSS

SEQ ID NO: 1943 - protein, 11 aa, Artificial
  FR4 sequence
WGQGTQVTVSS

SEQ ID NO: 1944 - protein, 11 aa, Artificial
  FR4 sequence
WGQGTQVTVSS

SEQ ID NO: 1945 - protein, 11 aa, Artificial
  FR4 sequence
WGQGTQVTVSS

SEQ ID NO: 1946 - protein, 11 aa, Artificial
  FR4 sequence
WGQGTQVTVSS

SEQ ID NO: 1947 - protein, 11 aa, Artificial
  FR4 sequence
WGQGTQVTVSS

SEQ ID NO: 1948 - protein, 11 aa, Artificial
  FR4 sequence
WGQGTQVTVSS

SEQ ID NO: 1949 - protein, 11 aa, Artificial
  FR4 sequence
WGQGTQVTVSS

SEQ ID NO: 1950 - protein, 11 aa, Artificial
  FR4 sequence
WGQGTQVTVSS

SEQ ID NO: 1951 - protein, 11 aa, Artificial
  FR4 sequence
WGQGTQVTVSS

SEQ ID NO: 1952 - protein, 11 aa, Artificial
  FR4 sequence
WGQGTQVTVSS

SEQ ID NO: 1953 - protein, 11 aa, Artificial
  FR4 sequence
WGQGTQVTVSS

SEQ ID NO: 1954 - protein, 11 aa, Artificial
  FR4 sequence
WGQGTQVTVSS

SEQ ID NO: 1955 - protein, 11 aa, Artificial
  FR4 sequence
WGQGTQVTVSS

SEQ ID NO: 1956 - protein, 11 aa, Artificial
  FR4 sequence
WGQGTQVTVSS

SEQ ID NO: 1957 - protein, 11 aa, Artificial
  FR4 sequence
WGQGTQVTVSS

SEQ ID NO: 1958 - protein, 11 aa, Artificial
  FR4 sequence
WGQGTQVTVSS

SEQ ID NO: 1959 - protein, 11 aa, Artificial
  FR4 sequence
WGQGTQVTVSS

SEQ ID NO: 1960 - protein, 11 aa, Artificial
  FR4 sequence
WGQGTQVTVSS

SEQ ID NO: 1961 - protein, 11 aa, Artificial
  FR4 sequence
WGQGTQVTVSS

SEQ ID NO: 1962 - protein, 11 aa, Artificial
  FR4 sequence
WGQGTQVTVSS

SEQ ID NO: 1963 - protein, 11 aa, Artificial
  FR4 sequence
WGQGTQVTVSS

SEQ ID NO: 1964 - protein, 11 aa, Artificial
  FR4 sequence
WGQGTQVTVSS

SEQ ID NO: 1965 - protein, 11 aa, Artificial
  FR4 sequence
WGQGTQVTVSS

SEQ ID NO: 1966 - protein, 11 aa, Artificial
  FR4 sequence
WGQGTQVTVSS

SEQ ID NO: 1967 - protein, 11 aa, Artificial
  FR4 sequence
WGQGTQVTVSS

SEQ ID NO: 1968 - protein, 11 aa, Artificial
  FR4 sequence
WGQGTQVTVSS

SEQ ID NO: 1969 - protein, 11 aa, Artificial
  FR4 sequence
WGQGTQVTVSS

SEQ ID NO: 1970 - protein, 11 aa, Artificial
  FR4 sequence
WGQGTQVTVSS

SEQ ID NO: 1971 - protein, 11 aa, Artificial
  FR4 sequence
WGQGTQVTVSS

SEQ ID NO: 1972 - protein, 11 aa, Artificial
  FR4 sequence
WGQGTQVTVSS

SEQ ID NO: 1973 - protein, 11 aa, Artificial
  FR4 sequence
WGQGTQVTVSS

SEQ ID NO: 1974 - protein, 11 aa, Artificial
  FR4 sequence
WGQGTQVTVSS

SEQ ID NO: 1975 - protein, 11 aa, Artificial
  FR4 sequence
WGQGTQVTVSS

SEQ ID NO: 1976 - protein, 11 aa, Artificial
  FR4 sequence
WGQGTQVTVSS

SEQ ID NO: 1977 - protein, 11 aa, Artificial
  FR4 sequence
WGQGTQVTVSS

SEQ ID NO: 1978 - protein, 11 aa, Artificial
  FR4 sequence
WGQGTQVTVSS

SEQ ID NO: 1979 - protein, 11 aa, Artificial
  FR4 sequence
RGQGTQVTVSS

SEQ ID NO: 1980 - protein, 11 aa, Artificial
  FR4 sequence
RGQGTQVTVSS

SEQ ID NO: 1981 - protein, 11 aa, Artificial
  FR4 sequence
WGRGTQVTVSS

SEQ ID NO: 1982 - protein, 11 aa, Artificial
  FR4 sequence
RGQGTQVTVSS

SEQ ID NO: 1983 - protein, 11 aa, Artificial
  FR4 sequence
WGQGTQVTVSS

SEQ ID NO: 1984 - protein, 11 aa, Artificial
  FR4 sequence
WGQGTQVTVSS

SEQ ID NO: 1985 - protein, 11 aa, Artificial
  FR4 sequence
WGQGTQVTVSS

SEQ ID NO: 1986 - protein, 11 aa, Artificial
  FR4 sequence
WGQGTQVTVSS

SEQ ID NO: 1987 - protein, 11 aa, Artificial
  FR4 sequence
WGQGTQVTVSS

SEQ ID NO: 1988 - protein, 11 aa, Artificial
  FR4 sequence
WGQGTQVTVSS

SEQ ID NO: 1989 - protein, 11 aa, Artificial
  FR4 sequence
WGQGTQVTVSS

SEQ ID NO: 1990 - protein, 11 aa, Artificial
  FR4 sequence
WGQGTQVTVSS

SEQ ID NO: 1991 - protein, 11 aa, Artificial
  FR4 sequence
WGQGTQVTVSS

SEQ ID NO: 1992 - protein, 11 aa, Artificial
  FR4 sequence
WGQGTQVTVSS

SEQ ID NO: 1993 - protein, 11 aa, Artificial
  FR4 sequence
WGQGNQVTVSS

SEQ ID NO: 1994 - protein, 11 aa, Artificial
  FR4 sequence
WGQGTQVTVSS

SEQ ID NO: 1995 - protein, 11 aa, Artificial
  FR4 sequence
WGQGTQVTVSS

SEQ ID NO: 1996 - protein, 11 aa, Artificial
  FR4 sequence
WGQGTQVTVSS

SEQ ID NO: 1997 - protein, 11 aa, Artificial
  FR4 sequence
WGQGTQVTVSS

SEQ ID NO: 1998 - protein, 11 aa, Artificial
  FR4 sequence
WGQGTQVTVSS

SEQ ID NO: 1999 - protein, 11 aa, Artificial
  FR4 sequence
WGPGTQVTVSS

SEQ ID NO: 2000 - protein, 11 aa, Artificial
  FR4 sequence
FGQGTQVTVSS

SEQ ID NO: 2001 - protein, 11 aa, Artificial
  FR4 sequence
FGQGTQVTVSS

SEQ ID NO: 2002 - protein, 11 aa, Artificial
  FR4 sequence
WGQGTQVTVSS

SEQ ID NO: 2003 - protein, 11 aa, Artificial
  FR4 sequence
WGQGTQVTVSS

SEQ ID NO: 2004 - protein, 11 aa, Artificial
  FR4 sequence
WGQGTQVTVSS

SEQ ID NO: 2005 - protein, 11 aa, Artificial
  FR4 sequence
WGQGTQVTVSS

SEQ ID NO: 2006 - protein, 11 aa, Artificial
  FR4 sequence
WGQGTQVTVSS

SEQ ID NO: 2007 - protein, 11 aa, Artificial
  FR4 sequence
WGQGTQVTVSS

SEQ ID NO: 2008 - protein, 11 aa, Artificial
  FR4 sequence
WGQGTQVTVSS

SEQ ID NO: 2009 - protein, 11 aa, Artificial
  FR4 sequence
WGQGTQVTVSS

SEQ ID NO: 2010 - protein, 11 aa, Artificial
  FR4 sequence
WGQGTQVTVSS

SEQ ID NO: 2011 - protein, 11 aa, Artificial
  FR4 sequence
WGQGTQVTVSS

SEQ ID NO: 2012 - protein, 11 aa, Artificial
  FR4 sequence
WGQGTQVTVSS

SEQ ID NO: 2013 - protein, 11 aa, Artificial
  FR4 sequence
WGKGTQVTVSS

SEQ ID NO: 2014 - protein, 11 aa, Artificial
  FR4 sequence
WGQGTQVTVSS

SEQ ID NO: 2015 - protein, 11 aa, Artificial
  FR4 sequence
WGQGTQVTVSS

SEQ ID NO: 2016 - protein, 11 aa, Artificial
  FR4 sequence
WGQGTQVTVSS

SEQ ID NO: 2017 - protein, 11 aa, Artificial
  FR4 sequence
WGQGTQVTVSS

SEQ ID NO: 2018 - protein, 11 aa, Artificial
  FR4 sequence
WGQGTQVTVSS

SEQ ID NO: 2019 - protein, 11 aa, Artificial
  FR4 sequence
WGQGTQVTVSS

SEQ ID NO: 2020 - protein, 11 aa, Artificial
  FR4 sequence
WGQGTQVTVSS

SEQ ID NO: 2021 - protein, 11 aa, Artificial
  FR4 sequence
WGQGTQVTVSS

SEQ ID NO: 2022 - protein, 11 aa, Artificial
  FR4 sequence
WGQGTQVTVSS

SEQ ID NO: 2023 - protein, 11 aa, Artificial
  FR4 sequence
WGQGTQVTVSS

SEQ ID NO: 2024 - protein, 11 aa, Artificial
  FR4 sequence
WGQGTQVTVSS

SEQ ID NO: 2025 - protein, 11 aa, Artificial
  FR4 sequence
WGQGTQVTVSS

SEQ ID NO: 2026 - protein, 11 aa, Artificial
  FR4 sequence
WGQGTQVTVSS

SEQ ID NO: 2027 - protein, 11 aa, Artificial
  FR4 sequence
WGQGTQVTVSS

SEQ ID NO: 2028 - protein, 11 aa, Artificial
  FR4 sequence
WGQGTQVTVSS

SEQ ID NO: 2029 - protein, 11 aa, Artificial
  FR4 sequence
WGQGTQVTVSS

SEQ ID NO: 2030 - protein, 11 aa, Artificial
  FR4 sequence
WGQGTQVTVSS

SEQ ID NO: 2031 - protein, 11 aa, Artificial
  FR4 sequence
WGQGTQVTVSS

SEQ ID NO: 2032 - protein, 11 aa, Artificial
  FR4 sequence
WGQGTQVTVSS

SEQ ID NO: 2033 - protein, 11 aa, Artificial
  FR4 sequence
WGQGTQVTVSS

SEQ ID NO: 2034 - protein, 11 aa, Artificial
  FR4 sequence
WGQGTQVTVSS

SEQ ID NO: 2035 - protein, 11 aa, Artificial
  FR4 sequence
WTVGTQVTVSS

SEQ ID NO: 2036 - protein, 11 aa, Artificial
  FR4 sequence
WGQGTQVTVSS

SEQ ID NO: 2037 - protein, 11 aa, Artificial
  FR4 sequence
WGQGTQVTVSS

SEQ ID NO: 2038 - protein, 11 aa, Artificial
  FR4 sequence
WGQGTQVTVSS

SEQ ID NO: 2039 - protein, 11 aa, Artificial
  FR4 sequence
WGQGTQVTVSS

SEQ ID NO: 2040 - protein, 11 aa, Artificial
  FR4 sequence
WGQGTQVTVSS

SEQ ID NO: 2041 - protein, 11 aa, Artificial
  FR4 sequence
WGQGTQVTVSS

SEQ ID NO: 2042 - protein, 11 aa, Artificial
  FR4 sequence
WGQGTQVTVSS

SEQ ID NO: 2043 - protein, 11 aa, Artificial
  FR4 sequence
WGQGIEVTVSS

SEQ ID NO: 2044 - protein, 11 aa, Artificial
  FR4 sequence
WGQGIEVTVSS

SEQ ID NO: 2045 - protein, 11 aa, Artificial
  FR4 sequence
WGQGTQVTVSS

SEQ ID NO: 2046 - protein, 11 aa, Artificial
  FR4 sequence
WGKGTQVTVSS

SEQ ID NO: 2047 - protein, 11 aa, Artificial
  FR4 sequence
KGQGTQVTVSS

SEQ ID NO: 2048 - protein, 11 aa, Artificial
  FR4 sequence
WGQGTQVTVSS

SEQ ID NO: 2049 - protein, 11 aa, Artificial
  FR4 sequence
WGQGTQVTVSS

SEQ ID NO: 2050 - protein, 11 aa, Artificial
  FR4 sequence
WGQGTQVTVSS

SEQ ID NO: 2051 - protein, 118 aa, Artificial
  Nanobody sequence
EVQLVESGGGLVHPGGSLRLSCVGSGFSLDDYGMTWVRRAPGKGLEWVSSINWSGTHTDYADSVKGRFTISRDNAKNTLFLQMNSLNPEDTAVYYCGQGWKIVPTNPRGHGTQVTVSS

SEQ ID NO: 2052 - protein, 118 aa, Artificial
  Nanobody sequence
EVQLVESGGGLVQPGGSLRLSCVGSGFSLDDYAMTWVRQAPGKGLEWVSSINWSGTHTDYADSVKGRFTISRDNAKNTLFLQMNSLSPEDTAVYYCNQGWKIRPTIPMGHGTQVTVSS

SEQ ID NO: 2053 - protein, 118 aa, Artificial
  Nanobody sequence
EVQLVESGGGLVQPGGSLRLSCVASGFSLDDYGMTWVRQAPGKGLEWVSSINWSGTHTDYTDPVKGRFTISRDNAKNTLFLQMNNLTPEDTAVYYCNRGWKIVPTDLGGHGTQVTVSS

SEQ ID NO: 2054 - protein, 118 aa, Artificial
  Nanobody sequence
EVQLVESGGGLVQPGGSLRLSCVASGFSLDDYGMTWVRQAPGKGLEWVSSINWSGTHTDYADSVKGRFTISRDNAKNTLFLQMNNLRSEDTAVYSCNQGWKIVPTDRGGHGTQVTVSS

SEQ ID NO: 2055 - protein, 118 aa, Artificial
  Nanobody sequence
EVQLVESGGGLVQPGGSLRLSCVASGFSLDDYGMTWVRQAPGKGLEWVSSINWSGTHTDYADSVKGRFTISRDNAKNTLFLQMNSLRSEDTAVYYCNQGWKIVPTDRGGHGTQVTVSS

SEQ ID NO: 2056 - protein, 118 aa, Artificial
  Nanobody sequence
EVQLVESGGGLVQPGGSLRLSCVASGFSLDDYGMTWVRQAPGKGLEWVSSINWSGTHTDYADSVKGRFTISRDNAKNTLFLQMNSLRSEDTAVYYCNQGWKIVPTDRRGHGTQVTVSS

SEQ ID NO: 2057 - protein, 118 aa, Artificial
  Nanobody sequence
EVQLVESGGGLVQPGGSLRLSCVASGFSLDDYGMTWVRQAPGKGLEWVSSINWSGTHTDYADSVKGRFTISRDNAKNTLFLQMNSLRSEDTAVYYCNQGWKIVPTDRTGHGTQVTVSS

SEQ ID NO: 2058 - protein, 117 aa, Artificial
  Nanobody sequence
EVQLVESGGGLVQAGGSLRLSCVASKMTFMRYTMGWYRQAPGKQRDLVASIDSSGGTNYADSVKGRFTISRDNAKNTVYLEMNSLTPEDTAVYYCNQGWKIVPTDRTGHGTQVTVSS

SEQ ID NO: 2059 - protein, 118 aa, Artificial
  Nanobody sequence
EVQLMESGGGLVQPGGSLRLSCVASGFSLDDYGMTWVRQAPGKGLEWVSSINWSGTHTDYADSVKGRFTISRDNAKNTLFLQMNSLRSEDTAVYYCNQGWKIVPTDRGGHGTQVTVSS

SEQ ID NO: 2060 - protein, 118 aa, Artificial
  Nanobody sequence
EVQLVESGGGLVQPGGSLRLSCVASGFSLDDYGMTWVRQAPGKGLEWVSSINWSGTHTDYADSVKGRFTISRDNAKNTLFLQMNSLRSEDTAVYYCNQGWKIVPTDRGSHGTQVTVSS

SEQ ID NO: 2061 - protein, 118 aa, Artificial
  Nanobody sequence
EVQLVESGGGLVQPGGSLRLSCVASGFSLDDYGMTWVRQAPGKELEWISSINWSGTHTDYADSVKGRFTISRDNAKNTLFLQMNSLTPEDTAVYYCNQGWKIVPMDRRGHGTQVTVSS

SEQ ID NO: 2062 - protein, 118 aa, Artificial
  Nanobody sequence
EVQLVESGGGLVQPGGSLRLSCVASGFSLDDYGMTWVRQAPGKGLEWVSSINWSGTHTDYADSVKGRFTISRDNAKNTLFLQMNSLTPEDTAVYYCNQGWKIIPTDRRGHGTQVTVSS

SEQ ID NO: 2063 - protein, 118 aa, Artificial
  Nanobody sequence
EVQLVESGGGLVQPGGSLRLSCVASGFSLDDYAMTWVRQAPGKGLEWVSSINWSGTHTDYADSVKGRFTISRDNARNTLFLQMNSLTPEDTAIYYCNQGWKILPTDRRGHGTQVTVSS

SEQ ID NO: 2064 - protein, 118 aa, Artificial
  Nanobody sequence
EVQLVESGGGLVQPGGSLRLSCVASGFSLDDYGMTWVRQAPGKGLEWVSSINWSGTHTDYADSVKGRFTISRDNAKNTLFLQMNSLSPEDTAVYYCNQGWKILPTNRGSHGTQVTVSS

SEQ ID NO: 2065 - protein, 118 aa, Artificial
  Nanobody sequence
EVQLVESGGGLVQPGGSLRLSCVASGFSLDDYGMTWVRQAPGKGFEWVSSINWSGTHTDYADSVKGRFTISRDNAKNTLFLQMNSLSPEDTAVYYCNQGWKILPTNRGSHGTQVTVSS

SEQ ID NO: 2066 - protein, 118 aa, Artificial
  Nanobody sequence
EVQLVESGGGLVQPGGSLRLSCVASGFSLDDYGMTWVRQAPGKGLEWVSSINWSGTHTDYADSVKGRFTISRDNAKNTLFLQMNSLSPEDTAVYYCNRGWKILPTNRGSHGTQVTVSS

SEQ ID NO: 2067 - protein, 118 aa, Artificial; identical to SEQ ID NO: 2062
  Nanobody sequence

SEQ ID NO: 2068 - protein, 118 aa, Artificial
  Nanobody sequence
EVQLVESGGGLVQPGGSLRLSCVASGFSLDDYGMTWVRQAPGKGLEWVSSINWSGTHTDYADSVRGRFVISRDNAKNTLFLQMNSLSPEDTAVYYCNQGWKIIPTDRRGHGTQVTVSS

SEQ ID NO: 2069 - protein, 118 aa, Artificial
  Nanobody sequence
EVQLVESGGGLVQPGGSLRLSCVASGFSLDDYGMTWVRQAPGKGLEWVSSINWSGTHTDYTDSVKGRFTISRDNAKNTLFLQMNSLTPEDTAVYYCNQGWKIIPTDRRGHGTQVTVSS

SEQ ID NO: 2070 - protein, 118 aa, Artificial
  Nanobody sequence
EVQLVESGGGLVQPGGSLKLSCVASGFSLDDYGMTWVRQAPGKGLEWVSSINWNVTHTDYAYSVKGRFTISRDNAKNTLFLQMNSLTPEDTAVYYCNQGWKIIPTDRRGHGTQVTVSS

SEQ ID NO: 2071 - protein, 118 aa, Artificial
  Nanobody sequence
EVQLVESGGGLVQPGGSLRLSCVASGFSLDDYGMTWVRQAPGKGLEWVSSINWSGTHTDCADSVKGRFTISRDNAKNTLFLQMNSLTPEDTAVYYCNQGWKIIPTDRRGHGTQVTVSS

SEQ ID NO: 2072 - protein, 118 aa, Artificial
  Nanobody sequence
EVQLVESGGGLVQPGGSLRLSCVASGFSLDDYGMTWVRQAPGKGLEWVSSINWSGTHTDYADSVKGRFTISRDNAKNTLFLQMNNLTPEDTAVYYCNQGWKIIPTDRRGHGTQVTVSS

SEQ ID NO: 2073 - protein, 118 aa, Artificial
  Nanobody sequence
EVQLVESGGGLVQPGGSLRLSCVASGFSLDDYGMTWVRQAPGKGLEWVSSINWSGTHTDYADSVKGRFVISRDNAKNTLFLQMNSLSPEDTAVYYCNQGWKIIPTDRRGHGTQVTVSS

SEQ ID NO: 2074 - protein, 118 aa, Artificial
  Nanobody sequence
EVQLVESGGGLVQPGGSLRLSCVASGFSLDDYAMTWVRQAPGKGLEWVSSINWSGTHTDYADSVKGRFTISRDNAKNTLFLQMNSLSPEDTAVYYCNKGWKVWPTDRGTHGTQVTVSS

SEQ ID NO: 2075 - protein, 118 aa, Artificial
  Nanobody sequence
EVQLVESGGGLVQPGGSLRLSCVASGFSLDDYAMTWVRQAPGKGLEWVSSINWSGTHTDYADSVKGRFTISRDNAKNTLFLQMNSLNPEDTAVYYCNQGWKVWPTDRGTHGTQVTVSS

SEQ ID NO: 2076 - protein, 118 aa, Artificial
  Nanobody sequence
EVQLVESGGGLVQPGGSLRLSCVASGFSLDDYGMTWVRQAPGKGLEWVSSINWSGTHTDYADSVKGRFTISRDNAKNTLFLQMNSLTPEDTAVYYCNQGWKILPAERRGHGTQVTVSS

SEQ ID NO: 2077 - protein, 118 aa, Artificial
  Nanobody sequence
EVQLVESGGGLVQPGGSLRLSCVASGFSLDDYGMTWVRQAPGKGLEWVSSINWSGTHTDYADSVKGRFTISRDNAKNTLFLQMNSLTPEDTAVYYCNQGWKILPAERRGHGTPVTVSS

SEQ ID NO: 2078 - protein, 118 aa, Artificial
  Nanobody sequence
EVQLVESGGGLVQPGGSLKLSCVASGFSLDDYGMTWVRQAPGKGLEWVSSINWNGTHTDYAYSVKGRFTISRDNAKNTLFLQMNSLTPENTAVYYCNQGWKILPAERRGHGTQVTVSS

SEQ ID NO: 2079 - protein, 118 aa, Artificial
  Nanobody sequence
EVQLVESGGGLVQPGGSLRLSCVASGFSLINYAMTWVRQAPGKGLEWVSSINWSGTHTDYADSVKGRFTISRDNAKNTLFLHMNNLSPEDTAVYYCGQGWKIHPADRGGHGTQVTVSS

SEQ ID NO: 2080 - protein, 118 aa, Artificial; identical to SEQ ID NO: 2076
  Nanobody sequence

SEQ ID NO: 2081 - protein, 118 aa, Artificial; identical to SEQ ID NO: 2052
  Nanobody sequence

SEQ ID NO: 2082 - protein, 120 aa, Artificial
  Nanobody sequence
EVQLVESGGGLVQPGGSLRLSCAASGFIFDDYAMSWVRQAPGKGLEWVSAINWSGSHRNYADSVKGRFTISRDNAKKTVYLQMNSLQSEDTAVYYCGTGWQSTTKNQGYWGQGTQVTVSS

SEQ ID NO: 2083 - protein, 120 aa, Artificial
  Nanobody sequence
EVQLVESGGGLVQPGGSLRLSCAASGFIFDDYAMSWVRQAPGKGLEWVSAINWSGTHRNYADSVKGRFTISRDNNKKTVYLQMNSLKSEDTAVYYCATGWQSTTKNQGYWGQGTQVTVSS

SEQ ID NO: 2084 - protein, 120 aa, Artificial
  Nanobody sequence
EVQLVESGGGLVQPGGSLKLSCAASGFIFDDYAMSWVRQAPGKGLEWVSAINWSGSHRNYADSVKGRFTISRDNAKKTVYLQMNSLQSEDTAVYYCGTGWQSTTKSQGYWGQGTQVTVSS

SEQ ID NO: 2085 - protein, 120 aa, Artificial
  Nanobody sequence
EVQLVESGGGLVQPGGSLTLSCAGSGFIFDDYAMSWVRQAPGKGLEWVSSINWSGSHRNYADSVKGRFTISRDNAKKTLYLQMNSLKSEDTAVYYCATGWQSTTKNQNYWGQGTQVTVSS

SEQ ID NO: 2086 - protein, 124 aa, Artificial
  Nanobody sequence
EVQLVESGGSLVQPGGSLRLSCAASGFTFDDYAMSWVRQAPGKGLEWISSINWSGTHKDYADSVKGRFTISRNNANNTLYLQMNNLKFEDTAVYYCAKNWRDAGTTWFEKSGSAGQGTQVTVSS

SEQ ID NO: 2087 - protein, 124 aa, Artificial
  Nanobody sequence
EVQLVESGGSLVQPGESLRLSCAASGFTFDDYAMSWVRQAPGKGLEWISSINWSGTHTDYADSVKGRFTISRNNANNTLYLQMNNLKFEDTAVYYCAKNWRDAGTTWFEKSGSAGQGTQVTVSS

SEQ ID NO: 2088 - protein, 124 aa, Artificial
  Nanobody sequence
EVQLVESGGSLVPPGGSLRLSCAASGFTFDDYAMSWVRQAPGKGLEWVSSINWSGTHTDYTDSVKGRFTISRNNANNTLYLQMNSLKSEDTAVYYCAKNWRDAGTTWFEKSGSAGQGTQVTVSS

SEQ ID NO: 2089 - protein, 124 aa, Artificial
  Nanobody sequence
EVQLVESGGSLVQPGGSLRLSCAASGFTFDDYAMSWVRQAPGKGLEWISSINWSGTHTDYADSVKGRFTISRNNANNTLYLQMNNLKFEDTAVYYCAKNWRDAGTTWFEKSGSAGQGTQVTVSS

SEQ ID NO: 2090 - protein, 124 aa, Artificial
  Nanobody sequence
EVQLVESGGSLVQPGGSLRLSCAASGFTFDDYAMSWVRQVPGKGLEWVSSINWSGTHTDYADSVKGRFTISRNNANNTLYLQMNSLKSEDTAVYYCAKNWRDAGTTWFEKSGSAGQGTQVTVSS

SEQ ID NO: 2091 - protein, 124 aa, Artificial
  Nanobody sequence
EVQLVESGGSLVPPGGSLRLSCAVSGFTFDDYAMSWVRQAPGKGLEWVSSINWSGTHTDYTDSVKGRFTISRNNANNMLYLQMNSLKSEDTAVYYCAKNWRDAGTTWFEKSGSAGQGTQVTVSS

SEQ ID NO: 2092 - protein, 124 aa, Artificial
  Nanobody sequence
EVQLVESGGSLVQPGGSLRLSCAASGFTFDDYALSWVRQAPGKGLEWISSINWSGTHTDYADSVKGRFTISRNNANNTLYLQMNNLKFEDTAVYYCAKNWRDAGTTWFEKSGSAGQGTQVTVSS

SEQ ID NO: 2093 - protein, 124 aa, Artificial
  Nanobody sequence
EVQLVESGGSLVQPGGSLRLSCAASGFTFDDYAMTWVRQAPGKGLEWVSSINWSGTHTDYADSVKGRFTISRNNANNTLYLQMNSLKSDDTAVYYCAKNWGDAGTTWFEKSGSAGPGTQVTVSS

SEQ ID NO: 2094 - protein, 124 aa, Artificial
  Nanobody sequence
EVQLVESGGSLVQPGGSLRLSCAASGFTFDDYAMTWVRQASGKGLEWVSSINWSGTHTDYTDSVKGRFTISRNNANNTLYLQMNSLKSEDTAVYYCAKNWGDAGTTWFEKSGSAGQGTQVTVSS

SEQ ID NO: 2095 - protein, 124 aa, Artificial
  Nanobody sequence
EVQLVESGGSLVPPGGSLRLSCAASGFTFDDYAMSWVRQAPGKGLEWVSSINWSGTHTGYTDSVKGRFTISRNNANNTLYLQMNSLKSEDTAVYYCAKNWGDAGTTWFEKSGSAGQGTQVTVSS

SEQ ID NO: 2096 - protein, 124 aa, Artificial
  Nanobody sequence
EVQLVESGGSLVQPGGSLRLSCAASGFTFDDYAMTWVRQAPGKGLEWVSSINWSGTHTDYTDSVKGRFTISRNNANNTLYLQMNSLKSEDTAVYYCAKNWGDAGTTWFEKSGSAGQGTQVTVSS

SEQ ID NO: 2097 - protein, 124 aa, Artificial
  Nanobody sequence
EVQLVESGGSLVQPGGSLRLSCAASGFTFDDYAMTWVRQAPGKGLEWVSSINWSGTHTDYTGSVKGRFTISRNNANNTLYLQMNSLKSDDTAVYYCAKNWGDAGTTWFEKSGSAGPGTQVTVSS

SEQ ID NO: 2098 - protein, 124 aa, Artificial
  Nanobody sequence
EVQLVESGGSLVPPGGSLRLSCAASGFTFDDYAMSWVRQAPGKGLEWVSSINWSGTHTDYTDSVKGRFTISRNNANNTLYLQMNSLKSEDTAVYYCAKNWGDAGTTWFEKSGSAGQGTQVTVSS

SEQ ID NO: 2099 - protein, 124 aa, Artificial
  Nanobody sequence
KVQLVESGGSLVPPGGSLRLSCAASGFTFDDYAMTWVRQAPGKGLEWVSSINWSGTHTDYTDSVKGRFTISRNNANNTLYLQMNSLKSEDTAVYYCAKNWGDAGTTWFEKSGSAGQGTQVTVSS

SEQ ID NO: 2100 - protein, 124 aa, Artificial; identical to SEQ ID NO: 2095
  Nanobody sequence

SEQ ID NO: 2101 - protein, 124 aa, Artificial
  Nanobody sequence
EVQLVESGGSLVPPGGSLRLSCAASGFTFDDYGMSWVRQAPGKGLEWVSSINWSGTHTDYTDSVKGRFTISRNNANNTLYLQMNSLKSEDTAVYYCAKNWGDAGTTWFEKSGSAGQGTQVTVSS

SEQ ID NO: 2102 - protein, 124 aa, Artificial
  Nanobody sequence
EVQLVESGGSLVQPGGSLRLSCAASGFTFDDYAMTWVRQAPGKGLEWVSSINWSGTHTDYTDSVKGRFTISRNNANNTLYLQMNSLKSDDTAVYYCAKNWGDAGTTWFEKSGSAGPGTQVTVSS

SEQ ID NO: 2103 - protein, 124 aa, Artificial
  Nanobody sequence
EVQLVESGGGLVQPGGSLRLSCATSGFTFDDYAMTWVRQAPGKGLEWVSSINWSGTHTDYTDSVKGRFTISRNNANNTLYLQMNSLKSEDTAVYYCAKNWGDAGTTWFEKSGSAGQGTQVTVSS

SEQ ID NO: 2104 - protein, 124 aa, Artificial
  Nanobody sequence
EVQLVESGGSLVQPGGSLRLSCATSGFTFDDYAMTWVRQAPGKGLEWVSSINWSGTHTDYTDSVKGRFTISRNNANNTLYLQMNSLKSEDTAVYYCAKNWGDAGTTWFEKSGSAGQGTQVTVSS

SEQ ID NO: 2105 - protein, 124 aa, Artificial
  Nanobody sequence
EVQLVESGGSLVQPGGSLRLSCAASGFTFDDYAMTWVRQAPGKGLEWVSSINWSGTHTDCTDSVKGRFTISRNNANNTLYLQMNSLKSEDTAVYYCAKNWGDAGTTWFEKSGSAGQGTQVTVSS

SEQ ID NO: 2106 - protein, 124 aa, Artificial
  Nanobody sequence
EVQLVESGGSLVQPGGSLRLSCAASGFTFDDYAMTWVRQASGKGLEWVSSINWSGTHTDYADSVKGRFTISRNNANNTLYLQMNSLKSEDTAVYYCAKNWGDAGTTWFEKSGSAGQGTQVTVSS

SEQ ID NO: 2107 - protein, 124 aa, Artificial
  Nanobody sequence
EVQLVESGGSLVQPGGSLRLSCAASGFTFDDYAMTWVRQAPGKGLEWVSSINWSGTHTDYTGSVKGRFTISRNNANNTLYLQMNSLKSDDTAVYYCAKNWGDAGTTWFEKSGSAGQGTQVTVSS

SEQ ID NO: 2108 - protein, 124 aa, Artificial; identical to SEQ ID NO: 2096
  Nanobody sequence

SEQ ID NO: 2109 - protein, 124 aa, Artificial; identical to SEQ ID NO: 2101
  Nanobody sequence

SEQ ID NO: 2110 - protein, 124 aa, Artificial
  Nanobody sequence
EVQLVESGGSLVQPGGSLRLSCAASGFTFDDYAMTWVRQTPGKGLEWVSSINWSGTHTDYTDSVKGRFTISRNNANNTLYLQMNSLKSDDTAVYYCAKNWGDAGTTWFEKSGSAGPGTQVTVSS

SEQ ID NO: 2111 - protein, 124 aa, Artificial; identical to SEQ ID NO: 2090
  Nanobody sequence

SEQ ID NO: 2112 - protein, 118 aa, Artificial
  Nanobody sequence
EVQLVESGGGLVQAGGSLRLSCAASGITFSINTMGWYRQAPGKQRELVALISSIGDTYYADSVKGRFTISRDNAKNTVYLQMNSLKPEDTAVYYCKRFRTAAQGTDYWGQGTQVTVSS

SEQ ID NO: 2113 - protein, 127 aa, Artificial
  Nanobody sequence
EVQLVESGGGFVQTGGSPRLSCAASGRSFSEYAAAWFRQSPGKERDLVAGIMWDGRSLFYADSVKGRFTISRDNAKNTLHLQMNSLKPEDTAVYYCAYHKTPYTTLELNRPHAFGSWGQGTQVTVSS

SEQ ID NO: 2114 - protein, 119 aa, Artificial
  Nanobody sequence
KVQLVESGGGLVQPGGSLRLSCAASGSIFGFNDMAWYRQAPGKQRELVALISRVGVTSSADSVKGRFTISRVNAKDTVYLQMNSLKPEDTAVYYCYMDQRLDGSTLAYWGQGTQVTVSS

SEQ ID NO: 2115 - protein, 123 aa, Artificial
  Nanobody sequence
EVQLVESGGGLVQAGGSLRLSCAASGSTFSSYGMGWFRQVPGKEREFVATINWSGVTAYADSVKGRFTISRDNAKKTVYLQMNSLKPEDTARYYCGVETYGSGSSLMTEYDYWGQGTQVTVSS

SEQ ID NO: 2116 - protein, 123 aa, Artificial
  Nanobody sequence
EVQLVESGGGLVQAGGSLRLSCAVNSRTFSSYGMGWFRQAPGKEREFVATINWSGVTAYADSIKGRFTISRDNAKETVYLQMNSLKPDDTGVYYCAAETYGSGSSLMSEYDYWGQGTQVTVSS

SEQ ID NO: 2117 - protein, 123 aa, Artificial
  Nanobody sequence
EVQLVESGGGLVQAGGSLRLSCAVSSRAFSSYGMGWFRQAPGKDREFVATINWSGVTAYADSIKGRFTISRDNAKETVYLQMNSLKPEDTGVYYCAAETYGSGSSLMSEYDYWGQGTQVTVSS

SEQ ID NO: 2118 - protein, 123 aa, Artificial
  Nanobody sequence
EVQLVESGGGLVQAGGSLRLSCAVNSRTFSSYGMGWFRQAPGKEREFVATINWSGATAYADSIKGRFTISRDNAKETVYLQMNSLKPDDTGVYYCAAETYGSGSSLMSEYDYWGQGTQVTVSS

SEQ ID NO: 2119 - protein, 123 aa, Artificial
  Nanobody sequence
EVQLVESGGGLVQAGGSLRLSCAVSSRAFSSYGMGWFRQAPGKDREFVATINWSGVTAYADSIKGRFTISRDNAKETVYLQMNSLKPDDTGVYYCAAETFGSGSSLMSEYDYWGQGTQVTVSS

SEQ ID NO: 2120 - protein, 123 aa, Artificial
  Nanobody sequence
EVQLVESGGGSVQAGGSLRLSCVASEGTFSSYGMGWFRQAPGKERAFVATINWSGVTAYADSVKGRFTISRDNAKKTVYLQMNSLKPEDTAVYYCATDTYGSGSSLMNEYDYWGQGTQVTVSS

SEQ ID NO: 2121 - protein, 123 aa, Artificial
  Nanobody sequence
EVQLVESGGGSVQAGSSLTLSCVASEGTFSSYGMGWFRQAPGKERAFVATINWSGVNAYADSVKGRFTISRDNAKKTAYLQMNSLKPEDTAVYYCAAETYGSGSSLMNEYDYWGQGTQVTVSS

SEQ ID NO: 2122 - protein, 123 aa, Artificial
  Nanobody sequence
EVQLVESGGGLVQPGGSLTLSCVASEGTFSSYGMGWFRQAPGKERAFVATINWSGVNAYADSVKGRFTISRDNAKKTAYLQMNSLKPEDTAVYYCAAETYGSGSSLMNEYDYWGQGTQVTVSS

SEQ ID NO: 2123 - protein, 123 aa, Artificial
  Nanobody sequence
EVQLVESGGGSVQAGGSLRLSCAASGSTFSSYGMGWFRQAPGKERAFVATINWSGVTAYADSVKGRFTISRDNAKKTVYLQMNSLKPEDTAVYYCATETYGSGSSLMNEYDYWGQGTQVTVSS

SEQ ID NO: 2124 - protein, 123 aa, Artificial
  Nanobody sequence
EVQLVKSGGGLVQAGGSLRLSCAASERTFSSYGMGWFRQAPGKEREFVATINWSGVTAYADSVKGRFTISRDNAKKTVYLQMNSLKPEDTAVYYCAAEPYGSGSSLISEYDYWGHGTQVTVSS

SEQ ID NO: 2125 - protein, 123 aa, Artificial
  Nanobody sequence
EVQLVESGGGLVQAGGSLRLSCAASERTFSSYGMGWFRQAPGKEREFVATINWSGVTAYADSVKGRFTISRDNAKKTVYLQMNSLKPEDTAVYYCAAEPYGSGSSLISEYDYWGHGTQVTVSS

SEQ ID NO: 2126 - protein, 123 aa, Artificial
  Nanobody sequence
EVQLVESGGGSVQAGGSLRLSCAASERTFSSYGMGWFRQAPGKEREFVATINWSGVTAYADSVKGRFTISRDNAKKTVYLQMNSLKPEDTAVYYCAAEPYGSGSSLMSEYDYWGHGTQVTVSS

SEQ ID NO: 2127 - protein, 120 aa, Artificial
  Nanobody sequence
EVQLVESGGGLVQAGGSLRLSCAANGLTFRRYDMGWYRQAPGQQREWVAAISGAGDINYADSVKGRFTMARDNANHTVHLQMNSLKPEDTAVYYCNANWKMLLGVENDYWGQGTQVTVSS

SEQ ID NO: 2128 - protein, 123 aa, Artificial
  Nanobody sequence
KVQLVESGGGLVQAGGSLRLSCAASGRTFTEYSMGWFRQAPGKEREFVATISWNYGYTYYSDSVKGRFTVSRDIAENTVYLQMNTLKSEDTAVYYCAAKIGWLSIRGDEYEYWGQGTQVTVSS

SEQ ID NO: 2129 - protein, 128 aa, Artificial
  Nanobody sequence
EVQLVESGGGLVQAGGSLRLSCAASGFTFDDYGIGWFRQASGKEREGVSCITSSDGSTYYADSVKGRFTISSDNAKNTVYLQMNSLKPEDTAVYYCAALPFVCPSGSYSDYGDEYDYWGQGTQVTVSS

SEQ ID NO: 2130 - protein, 121 aa, Artificial
  Nanobody sequence
EVQLVESGGGLVQPGGSLRLSCAASGFAFSSYAMSWVRQAPGKGLEWVSAVDSGGGRTDYAHSVKGRFTISRDNAKNTLYLQMSSLKPEDTALYYCTKHVSDSDYTEYDYWGQGTQVTVSS

SEQ ID NO: 2131 - protein, 125 aa, Artificial
  Nanobody sequence
EVQLVESGGGLVQAGGSLRLSCTASGRTSSTSAMGWFRQAPGKEREFVATISRGGSATYYADSLKGRFTISRDNAKNTLYLQMNSLKPEDTAVYYCAARRSSLYTSSNVFEYDYWGQGTQVTVSS

SEQ ID NO: 2132 - protein, 113 aa, Artificial
  Nanobody sequence
EVQLVESGGGLVQAGGSLRLSCVTSRRPASTRTMAWYRQAPGKQRDWVATISSHGLPVYADSVKGRFTVSRDNANNTVYLQMNTLKPEDTAVYYCRDVNADYWGQGTQVTVSS

SEQ ID NO: 2133 - protein, 113 aa, Artificial
  Nanobody sequence
EVQLVESGGGLVQPGGSLRLSCAASRIPFSTRTMAWYRQAPGKQRDWVATIGTSGPPRYADSVKGRFTVSRDNAKNTVYLQMNSLKAEDTAVYYCWDVNADYWGQGTQVTVSS

SEQ ID NO: 2134 - protein, 113 aa, Artificial
  Nanobody sequence
EVQLVESGGGLVQAGGSLRLSCVTSRRPASTRTMAWYRQAPGKQRDWVATISSHGLPVYADSVKGRFTVSRDNANNTVYLQMNTLKPEDTAVYYCRDVNADYWGQGTPVTVSS

SEQ ID NO: 2135 - protein, 113 aa, Artificial
  Nanobody sequence
EVQLVESGGGLVQAGGSLRLSCVASRIPFSSRTMAWYRQAPGKQRDWVATISARGMPAYEDSVKGRFTVSRDNDKNTLYLQMNSLKPEDTAVYYCRDVNADYWGQGTQVTVSS

SEQ ID NO: 2136 - protein, 113 aa, Artificial
  Nanobody sequence
EVQLVESGGGLVQAGGSLRLSCVTSRRPASTRTMAWYRQAQGKQRDWVATISSHGLPVYADSVKGRFTVSRDNANNTVYLQMNTLKPEDTAVYYCRDVNADYWGQGTQVTVSS

SEQ ID NO: 2137 - protein, 112 aa, Artificial
  Nanobody sequence
EVQLVESGGGLVQAGGSLNLSCVASGIPFSTRTMAWYRQAPGKPRDWVATIRNGAPVYADSVKGRFTVSRDNAKNTLYLQMNSLKPEDTATYLCRDVNGDIWGQGTQVTVSS

SEQ ID NO: 2138 - protein, 112 aa, Artificial
  Nanobody sequence
EVQLVESGGGLVQAGGSLNLSCVASGIPFSTRTMAWYRQPPGNERDWVATIRSGAPVYADSVKGRFTVSRDNAKNTLYLQMNSLEPEDTATYYCWDVNGDIWGQGTPVTVSS

SEQ ID NO: 2139 - protein, 112 aa, Artificial
  Nanobody sequence
EVQLVESGGGLVQAGGSLNLSCVASGIPFSTRTMAWYRQTPGKSRDWVATIRSGTPVYADSVKGRFTVSRDNAKNTLYLRMNSLKSEDSATYTCRAVNADIWGQGTQVTVSS

SEQ ID NO: 2140 - protein, 113 aa, Artificial
  Nanobody sequence
EVQLVESGGGLVQPGGSLRLSCVASRIPASIRTMAWYRQTPGNQRDWLATIGSSGTPAYADSVKGRFTVSRDNAKNTVYLQMNSLKPEDTAVYYCRDVNGDYWGQGTQVTVSS

SEQ ID NO: 2141 - protein, 113 aa, Artificial
  Nanobody sequence
EVQLVESGGGLVQAGGSLRLSCVASRIPASIRTMAWYRQAPGKQRDWVATIGTGGTPAYADSFKGRFTVSRDNANHTVYLQMNSLKPEDTAVYYCRDVNGDYWGQGTQVTVSS

SEQ ID NO: 2142 - protein, 113 aa, Artificial; identical to SEQ ID NO: 2140
  Nanobody sequence

SEQ ID NO: 2143 - protein, 113 aa, Artificial
  Nanobody sequence
EVQLVESGGGLVQPGGSLKLSCVASTIPASIRTMAWYRQTPGNQRDWLATIGSSGTPAYADSVKGRFTVSRDNAKNTVYLQMNSLKPEDTAVYYCRDVNGDYWGQGTQVTVSS

SEQ ID NO: 2144 - protein, 113 aa, Artificial
  Nanobody sequence
EVQLVESGGGLVQAGGSLRLSCVASGIPFRSRTMAWYRQAPGKTRDWVATIGTHGTPLYADSVKGRFTVSRDNAKNTLYLQMNSLKPEDTAVYYCWDVNGDYWGQGTQVTVSS

SEQ ID NO: 2145 - protein, 120 aa, Artificial
  Nanobody sequence
EVQLVESGGGLVQAGESLRLSCATSGITFKRYVMGWYRQGPGKQRELVATVNDGGTTSYADSVKGRFAISRDNAKNTAYLQMNSLKAEDTAVYYCNAVWKLPRFVDNDYWGQGTQVTVSS

SEQ ID NO: 2146 - protein, 120 aa, Artificial
  Nanobody sequence
EVQLMESGGGLVQAGGSLRLSCAANGLTFRRYDMGWYRQAPGQQREWVAAISGAGDINYADSVKGRFTMARDNANHTVHLQMNSLKPEDTAVYYCNANWKMLLGVENDYWGQGTQVTVSS

SEQ ID NO: 2147 - protein, 120 aa, Artificial; identical to SEQ ID NO: 2127
  Nanobody sequence

SEQ ID NO: 2148 - protein, 115 aa, Artificial
  Nanobody sequence
EVQLVESGGGLVQPGGSLRLSCAASGLGIAFSRRTMAWYRQAPGKQRDWVATIAGDGSTVYADSMKGRFTISRDNAENTVYLQMNSLKPEDTAVYYCWDVNRDYWGQGTQVTVSS

SEQ ID NO: 2149 - protein, 115 aa, Artificial
  Nanobody sequence
EVQLVESGGGLVQPGGSLRLSCAASGLGIAFSRRTMAWYRQAPGKQRDWVATIAGDGSTVYADSMKGRFTISRDNAKNTVYLQINSLKPEDTAVYYCWDVNRDYWGQGTQVTVSS

SEQ ID NO: 2150 - protein, 113 aa, Artificial
  Nanobody sequence
EVQLVESGGGLVQAGGSLRLSCVASGIAQSIRVMAWYRQPPGKQRDWVGTISSDGTANYADSVKGRFTISRDNAKKTMYLQMNSLKPDDTAVYYCRDVNRDYWGQGTQVTVSS

SEQ ID NO: 2151 - protein, 113 aa, Artificial
  Nanobody sequence
EVQLVESGGGLVQAGGSLRLSCAASGIAFRIRTMAWYRQAPGKQRDWVATSDSGGTTLYADSVKGRFTVSRDNAENTVYLQMNSLKPEDTAVYYCRDVNRDYWGQGTQVTVSS

SEQ ID NO: 2152 - protein, 112 aa, Artificial
  Nanobody sequence
EVQLVESGGGLVQAGGSLRLSCVASGIPSIRAIAWYRQAPGKQRDWVATSGTGYGATYDDSVKGRFTLSRDNAKNTVYLQMNSLKPEDTAVYYCRDVNRDYWGQGTQVTVSS

SEQ ID NO: 2153 - protein, 115 aa, Artificial
  Nanobody sequence
EVQLMESGGGLVQPGGSLRLSCAASGLGIAFSRRTMAWYRQAPGKQRDWVATIAGDGSTVYADSMKGRFTISRDNAENTVYLQMNSLKPEDTAVYYCWDVNRDYWGQGTQVTVSS

SEQ ID NO: 2154 - protein, 113 aa, Artificial
  Nanobody sequence
EVQLVESGGGLVQAGGSLRLSCAASGIAFRIRTMAWYRQAPGKQRDWVATIGSDGTTIYADSVKGRFTLSRHNAENTVYLQMNSLKPEDTAVYYCRDVNRDYWGQGTQVTVSS

SEQ ID NO: 2155 - protein, 114 aa, Artificial
  Nanobody sequence
EVQLVESGGGLVQAGGSLRLSCVVSGIPSSIRAMAWYRQAPGRQRDWVATIYSPSGSAVYADSVKGRFTISSDNAKSTIYLQMNSLKPDDTAVYYCRDVNRDYWGQGTQVTVSS

SEQ ID NO: 2156 - protein, 114 aa, Artificial
  Nanobody sequence
EVQLVESGGGSVQAGGSLRLSCVVSGIPSSIRAMAWYRQAPGRQRDWVATIYSRSGGAVYADSVKGRFTISSDNAKNTIYLQMNSLKPDDTAVYYCRDVNRDYWGQGTQVTVSS

SEQ ID NO: 2157 - protein, 112 aa, Artificial
  Nanobody sequence
EVQLVESGGGLVQAGGSLRLSCVASGIPSIHAMAWYRQAPGKQRDWGATTYSRGGTTYNDSAKGRFTISRDNAKKTVYLQMNSLKPEDTAVYYCRDVNRDYWGQGTQVTVSS

SEQ ID NO: 2158 - protein, 113 aa, Artificial
  Nanobody sequence
EVQLVESGGGLVQPGGSLRLSCAASGIIGTIRTMAWYRQAPGKQRDWVASIGTRGAPVYADSVNGRFTISRDGATNTVFLQMNNLKPEDTAVYYCRDVNRDYWGQGTQVTVSS

SEQ ID NO: 2159 - protein, 113 aa, Artificial
  Nanobody sequence
EVQLVESGGGLVQAGGSLRLPCAASGIAFRIRTMAWYRQAPGKQRDWVATSDSGGTTLYADSVKGRFTVSRDNAENTVYLQMNSLKPEDTAVYYCRDVNRDYWGQGTQVTVSS

SEQ ID NO: 2160 - protein, 113 aa, Artificial
  Nanobody sequence
EVQLVESGGGLVQAGGSLRLSCAASGIAFRIRTMAWYRQAPGKQRDWVATSDSGGTTLYADSVKGRFTVSRDNADNTVYLQMNSLKPEDTAVYYCRDVNRDYWGQGTQVTVSS

SEQ ID NO: 2161 - protein, 114 aa, Artificial
  Nanobody sequence
EVQLVESGGGLVQAGGSLRLSCVVSGIPSSIRAMAWYRQAPGRQRDWVATIYSPSGSAVYADSVKGRFTISSDNAKSTIYLQMNSLEPDDTAVYYCRDVNREYWGQGTQVTVSS

SEQ ID NO: 2162 - protein, 114 aa, Artificial
  Nanobody sequence
EVQLVESGGGLVQAGGSLRLSCVVSGIPSTIRAMAWYRQAPGRQRDWVATIYSPSGSAVYADSVKGRFTISSDNAKKTIYLQMNSLKPDDTAVYYCRDVNREYWGQGTQVTVSS

SEQ ID NO: 2163 - protein, 114 aa, Artificial
  Nanobody sequence
EVQLVESGGGLVQAGGSLRLSCVVSGIPSSIRAMAWYRQAPGRQRDWVATIYSPSGSAVYADSVKGRFTISSDNAKSTIYLQMNSLKPDDTAVYYCRDVNREYWGQGTQVTVSS

SEQ ID NO: 2164 - protein, 123 aa, Artificial
  Nanobody sequence
EVQLVESGGGLVQAGGSLRLSCAASGRTFSDDAMGWFRQAPGKERECVASLYLNGDYPYYADSVKGRFTISRDNAKNAVILQMNNLKTEDTAVYYCAAKPGWVARDPSQYNYWGQGTQVTVSS

SEQ ID NO: 2165 - protein, 123 aa, Artificial
  Nanobody sequence
EVQLVESGGGLVQAGGSLRLSCAASGRAFKDDAVGWFRQAPGKERECVASMYLDGDYPYYADSVKGRFTISRDNAKNAVILQMNNLKTEDTAVYYCAAKPGWVARDPSEYNYWGQGTQVTVSS

SEQ ID NO: 2166 - protein, 113 aa, Artificial
  Nanobody sequence
EVQLVESGGGLVQTGGSLRLSCAASGSTFRTDMMGWYRQAPGKQREFVASITKFGSTNYADSVKGRFTISNDNAKDTVYLQMNSLKSEDTAVYYCRNFNRDLWGQGTQVTVSS

SEQ ID NO: 2167 - protein, 113 aa, Artificial
  Nanobody sequence
EVQLVESGGGLVQAGGSLKLSCVNSGIPSTLRAMAWYRQAPGRQRDWVATSSNTGGTTYDDSVKGRFTISRDNAKNTVYLQMNSLKPEDTGVYYCRDVNRDLWGQGTQVTVSS

SEQ ID NO: 2168 - protein, 123 aa, Artificial
  Nanobody sequence
EVQLVESGGGLVQPGGSLRLSCAASSVITLDSNAIGWFRQAPGKEREEVSCIASSDGSTYYAESVKGRFTISKDYTRNTVYLQVNSLKPEDTAVYHCATDANPNCGLNVWNSWGQGTQVTVSS

SEQ ID NO: 2169 - protein, 116 aa, Artificial
  Nanobody sequence
EVQLVESGGGLVQAGGSLTLSCAASGSTSSLDIMAWYRQAPEKQRELVASVSGGGNSDYASSVKGRFTISGDTAKSTLYLQMNSLKPEDTAMYYCYGRDYYYMPFWGQGTQVTVSS

SEQ ID NO: 2170 - protein, 113 aa, Artificial
  Nanobody sequence
EVQLVESGGGLAQAGGSLSLSCAASGRFFSTRVMAWYRQTPGKQREFVASMRGSGSTNYADSARGRFAISRDNAKNTVYLQMNSLKPEDTAVYYCRDINEDQWGQGTQVTVSS

SEQ ID NO: 2171 - protein, 113 aa, Artificial
  Nanobody sequence
EVQLVESGGGLVQAGGSLSLSCAASGRFFSTRVMAWYRQTPGKQREFVASMRGSGSTNYADSVRGRFAISRDNAKNMVYLQMNTLKPEDTAVYYCRDINEDQWGQGTQVTVSS

SEQ ID NO: 2172 - protein, 113 aa, Artificial
  Nanobody sequence
EVQLVESGGGLVQAGGSLSLSCAASGRFFSTRVMAWYRQTPGKQREFVASMRGSGSTNYADSARGRFAISRDNAKNTVYLQMNSLKPEDTAVYYCRDINEDQWGQGTQVTVSS

SEQ ID NO: 2173 - protein, 113 aa, Artificial
  Nanobody sequence
EVQLVESGGGLVQAGGSLSLSCVASGRFFSTRVMAWYRQTPGKQREFVASMRGSGSTNYADSVRGRFAISRDNAKNTVYLQMNTLKPEDTAVYYCRDINEDQWGQGTQVTVSS

SEQ ID NO: 2174 - protein, 113 aa, Artificial
  Nanobody sequence
EVQLVESGGGLVQAGGSLSLSCSASGRFFSTRVMAWYRQTPGNQREFVATIHSSGSTIYADSVRGRFAISRDNAKNTVYLQMRSLKPEDTAVYYCRDINADQWGQGTQVTVSS

SEQ ID NO: 2175 - protein, 113 aa, Artificial
  Nanobody sequence
EVQLVESGGGLVQAGGSLTLSCTASETTVRIRTMAWYRQPPGNQREWVATIGSNGFATYPDSVKGRFTISRDNAKNTVYLQMNSLKPEDTAVYYCRDINRDIWGQGSQVTVSS

SEQ ID NO: 2176 - protein, 113 aa, Artificial
  Nanobody sequence
EVQLVESGGGLVQAGGSLTLSCAPSESTVSFNTVAWYRQAPGEQREWVATISRQGMSTYPDSVKGRFTISRDNAKNTVYLQMNNLKPEDTAVYYCRDINHDIWGRGSQVTVSS

SEQ ID NO: 2177 - protein, 113 aa, Artificial
  Nanobody sequence
EVQLVESGGGLVQAGGSLRLSCAASGIISSFRTMAWYRQAPGKQRDWVATIGSDGLANYADSVKGRFTISRDNAKKTVYLQMNSLKPEDTAVYFCRDINRDYWGQGTQVTVSS

SEQ ID NO: 2178 - protein, 113 aa, Artificial
  Nanobody sequence
EVQLVESGGGLVQAGGSLRLSCVVSGVFGPIRAMAWYRQAPGKQRDWVATIGSSGHPVYTDSVKGRFTFSKDGAKNTVYLQMNSLKPEDTAVYYCRDINRDYWGQGTQVTVSS

SEQ ID NO: 2179 - protein, 115 aa, Artificial
  Nanobody sequence
EVQLVESGGGLVQPGGSLRLSCAASGIGIAFSSRTMAWYRQAPGKQRDWVATIGSGGTTNYADSVKGRFTISRDNAKNTVYLQMNSLKPEDTAVYYCRDINRDYWGQGTQVTVSS

SEQ ID NO: 2180 - protein, 113 aa, Artificial
  Nanobody sequence
EVQLVESGGGLVQPGGSLRLSCAASGIIGSFRTMAWYRQAPGNQRDWVATIGSAGLASYADSVRGRFTLSRDNAKKTVYLQMNSLKPEDTAIYYCRDINGDYWGQGTQVTVSS

SEQ ID NO: 2181 - protein, 115 aa, Artificial
  Nanobody sequence
EVQLVESGGGLVQAGGSLRLSCAASGIISSFRTLAWYRQAPGKQRDWVATISSAGGTAYADAVKGRFTISISRDNVEYTVDLQMDSLKPEDTAVYYCRDINGDYWGQGTQVTVSS

SEQ ID NO: 2182 - protein, 115 aa, Artificial
  Nanobody sequence
EVQLVESGGGLVQPGGSLRLSCAASGLGIAFSRRTMAWYRQAPGKQRDWVATIAGDGSTVYADSMKGRFTISRDNAKNTVYLQVNSLKPEDTAVYYCWDTNGDYWGQGTQVTVSS

SEQ ID NO: 2183 - protein, 120 aa, Artificial
  Nanobody sequence
EVQLVESGGGLVQPGGSLRLSCAGSGFTFSNYAMTWVRQAPGKGLEWVSGVGGDGVGSYADSVKGRFTISRDNAKNTLYLQMNSLKPEDTALYYCTKDISTFGWGPFDYWGQGTQVTVSS

SEQ ID NO: 2184 - protein, 117 aa, Artificial
  Nanobody sequence
EVQLVESGGGLVQAGGSLRLSCVASKMTFMRYTMGWYRQAPGKQRDLVASIDASGGTNYADSVKGRFTISRDNAKNTVYLEMNSLKPEDTGVYYCNGRWDIVGAIWWGQGTQVTVSS

SEQ ID NO: 2185 - protein, 117 aa, Artificial
  Nanobody sequence
EVQLVESGGGLVQAGGSLRLSCVASKMTFMRYTMGWYRQAPGKQRDLVASIDSSGGTNYADSVKGRFTISRDNAKNTVYLEMNSLKPEDTGVYYCNGRWDIVGAIWWGQGTQVTVSS

SEQ ID NO: 2186 - protein, 117 aa, Artificial
  Nanobody sequence
EVQLVESGGGLVQAGGSLRLSCVASKITFRRYIMDWYRQAPGKQRELVASINSDGSTGYTDSVKGRFTISRDNTKNTLDLQMNSLKPEDTAVYYCHGRWLEIGAEYWGQGTQVTVSS

SEQ ID NO: 2187 - protein, 117 aa, Artificial
  Nanobody sequence
EVQLVESGGGLVQAGGSLKLSCVASGITFFRYTMGWYRQAPGKERELVAEISSADEPSFADAVKGRFTISRDNAKNTVVLQMNGLKPEDTAVYYCKGSWSYPGLTYWGKGTLVTVSS

SEQ ID NO: 2188 - protein, 117 aa, Artificial
  Nanobody sequence
EVQLVESGGGLVQAGGSLRLSCAASGITFRRYDMGWYRQFPGKERELVATILSEGDTNYVDPVKGRFTISRDNAKNTVYLQMNDLKPEDTAVYYCNGVWRAIGRTYWGQGTQVTVSS

SEQ ID NO: 2189 - protein, 118 aa, Artificial
  Nanobody sequence
EVQLVESGGGLVQAGGSLRLSCAASASIFGFDSMGWYRQAPGNERILVAIISNGGTTSYRDSVKGRFTIARDNAKNTVSLQMNSLKPEDTAVYYCNLDRRSYNGRQYWGQGTQVTVSS

SEQ ID NO: 2190 - protein, 122 aa, Artificial
  Nanobody sequence
EVQLVESGGGLVQAGGSLRLSCAASGNIFSHNAMGWYRQAPGKQRELVTYITINGIANYVDSVKGRFTISRDNTKNTMYLQMVSLKPEDTAVYYCNVGGREYSGVYYYREYWGQGTQVTVSS

SEQ ID NO: 2191 - protein, 121 aa, Artificial
  Nanobody sequence
EVQLVESGGGLVQAGDSLRLSCAASGRALDTYVMGWFRQAPGDGREFVAHIFRSGITSYASSVKGRFTISRDNAKNTVYLQMASLKPEDTAAYYCAARPSDTTWSESSASWGQGTQVTVSS

SEQ ID NO: 2192 - protein, 121 aa, Artificial
  Nanobody sequence
EVQLVESGGGLVQPGGSLRLSCAASGFTFDDYSMSWVRQATGKGLEWVSGISWNGGSTNYADSVKGRFTISRDNVKNTLYLQMNSLKSEDTAVYYCAKDLGNSGRGPYTNWGQGTQVTVSS

SEQ ID NO: 2193 - protein, 122 aa, Artificial
  Nanobody sequence
EVQLVESGGGLVQPGGSLKLSCAASGFTFSSYRMYWVRQAPGKGLEWVSAIKPDGSITYYADSVKGRFTISRDNAKNTVYLQMNSLKPEDTAVYYCATDCGVPGFGWTFSSWGQGTQVTVSS

SEQ ID NO: 2194 - protein, 117 aa, Artificial
  Nanobody sequence
EVQLVESGGGLVQAGGSLRLSCAASGSTFSINRMAWYRQSPGKQRELVAAVDNDDNTEYSDSVAGRFTISRDNAKNAVHLQMNSLRLEDTAVYYCNAKQLPYLQNFWGQGTQVTVSS

SEQ ID NO: 2195 - protein, 117 aa, Artificial
  Nanobody sequence
EVQLVESGGGLVQAGGSLRLSCAASGSTFSINRWGWYRQAPGKQRELVAAIDDGGNTEYSDFVNGRFTISRDNPETAVHLQMNSLKLEDTAVYYCNAKQLPYLQNFWGQGTQVTVSS

SEQ ID NO: 2196 - protein, 114 aa, Artificial
  Nanobody sequence
EVQLVESGGGLVQAGGSLSLSCAASATLHRFDNNWYRQAPGKQRELVATIAHDGSTNYANSVKGRFTISRDNARDTLFLQMHALQPEDTAVYMCNLHRWGLNYWGQGTQVTVSS

SEQ ID NO: 2197 - protein, 122 aa, Artificial
  Nanobody sequence
EVQLVESGGGLVQPGGSLRLSCAASGFTFSSYAMSWVRQAPGKGLEWVSAISSGGGSITTYADSVKGRFTISRDNAKNTLYLQMSSLKPEDTALYYCAKARSSSSYYDFGSWGQGTQVTVSS

SEQ ID NO: 2198 - protein, 122 aa, Artificial
  Nanobody sequence
EVQLVESGGGLVQPGGSLRLSCAASGFTFSSYAMSWVRQAPGKGLEWVSAISSGGGSITTYADSVKGRFTISTDNAKNTLYLQMSSLKPEDTALYYCAKARSSSSYYDFGSWGQGTQVTVSS

SEQ ID NO: 2199 - protein, 122 aa, Artificial
  Nanobody sequence
EVQLVESGGGLVQPGGSLRLSCAASGFTLDYCAIGWFRQAPGKEREGVSCISSSDGSTYYADSVKGRFTISRDNAKNTVYLQMNSLKPEDTAVYYCATDRGSGTCYADFGSWGQGTQVTVSS

SEQ ID NO: 2200 - protein, 120 aa, Artificial
  Nanobody sequence
EVQLVESGGGLVQPGGSLRLSCAASGFIFDDYAMSWVRQAPGKGLEWVSSINWSGTHTDYAEDMKGRFTISRDNAKKTLYLQMNSLQSEDTAVYYCAKGWGPAVTSIPVATLGTQVTVSS

SEQ ID NO: 2201 - protein, 113 aa, Artificial; identical to SEQ ID NO: 2175
  Nanobody sequence

SEQ ID NO: 2202 - protein, 113 aa, Artificial; identical to SEQ ID NO: 2175
  Nanobody sequence

SEQ ID NO: 2203 - protein, 113 aa, Artificial; identical to SEQ ID NO: 2175
  Nanobody sequence

SEQ ID NO: 2204 - protein, 113 aa, Artificial; identical to SEQ ID NO: 2175
  Nanobody sequence

SEQ ID NO: 2205 - protein, 122 aa, Artificial
  Nanobody sequence
EVQLVESGGGLVQPGGSLRLSCAASGRIFYPMGWFRQAPGKEREFVAAIGSGDIITYYADSVKGRFTISRDNAKNTVYLQMNSLKPEDTAVYYCASSRDYSRSRDPTSYDRWGQGTQVTVSS

SEQ ID NO: 2206 - protein, 122 aa, Artificial
  Nanobody sequence
EVQLVESGGGLVQPGGSLRLSCAASGFTFDDYATSWVRQAPGKGPEWVSAINSGGGSTYYADSVKGRFTISRDNAKNTLYLQMNSLKPEDTAVYYCARPRGSSLYLLEYDYWGQGTQVTVSS

SEQ ID NO: 2207 - protein, 120 aa, Artificial
  Nanobody sequence
EVQLVESGGGLVQAGGSLRLSCAASGRTFNAMGWFRQAPGKEREFVAAISRSPGVTYYADSVKGRFTTSRDNAKNTVYLQMNDLKPEDTAVYYCAADFYLATLAHEYDYWGQGTQVTVSS

SEQ ID NO: 2208 - protein, 122 aa, Artificial
  Nanobody sequence
EVQLVESGGGLVQAGGSLRLSCAASGRTFSSYAMAWFRQAPGTEREFIAGIRWSDGSTYYADSVKGRFTISRDNAKNTVYLQMNSLKPEDTAVYYCAADFYVSTLAHEYDYWGQGTQVTVSS

SEQ ID NO: 2209 - protein, 122 aa, Artificial
  Nanobody sequence
KVQLVESGGGLVQAGGSLRLSCAASGRTFSSYAMAWFRQAPGTEREFIAGIRWSDGSTYYADSVKGRFTISRANAKNTVYLQMNGLKPEDTAVYYCAADFYVSTLAHEYDYWGQGTQVTVSS

SEQ ID NO: 2210 - protein, 122 aa, Artificial
  Nanobody sequence
EVQLVESGGGLVQAGGSLRLSCAASGRTFSSYAMAWFRQAPGKEREFVGGIRWSDGSTYYADSVKGRFTISRDNAKITVYLQMNSLKPEDTAVYYCAADFYVSTLAHEYDYWGQGTQVTVSS

SEQ ID NO: 2211 - protein, 123 aa, Artificial
  Nanobody sequence
EVQLVESGGGLVQAGGSLRLSCAASGRTFSSYAMGWFRQAPGKERAFVAAIRWSGGNTYYADSVKGRFTISRDNAKNTVYLQMNSLKPEDTAVYYCAADTFTLSTLSHEYDYWGQGTQVTVSS

SEQ ID NO: 2212 - protein, 123 aa, Artificial
  Nanobody sequence
EVQLVESGGGLVQAGGSLRLSCVASGRTFSNYALAWFRQAPGKEREFVAAINWRSGGSTYYADSVKGRFTISRDNAKNTVYLQMNSLKPEDTAVYYCAADLIVATLPGEYDYWGQGTQVTVSS

SEQ ID NO: 2213 - protein, 122 aa, Artificial
  Nanobody sequence
EVQLVESGGGLVQAGGSLRLSCAASGRTFSRFAMGWFRQAPGKEREFVAAVRWSDDYTYYADSVKGRFTISRDNAKNTVYLQMNSLSPEDTAVYYCAADEILATLPHEYDYWGQGTQVTVSS

SEQ ID NO: 2214 - protein, 124 aa, Artificial
  Nanobody sequence
EVQLVESGGGLVQAGGSLRLSCAASGRTFSSYAMAWFRQAPGKEREFVAGINKSGGITHSADSVKGRFTISRDNAKNTVYLQMNSLKPEDTAVYYCAADAYTVIATLPHEYDYWGQGTQVTVSS

SEQ ID NO: 2215 - protein, 123 aa, Artificial
  Nanobody sequence
EVQLVESGGGLVQAGGSLRLSCEASGLTISSLTMAWFRQAPGKEREFVANIKWSGDRIVYADSVKGRFTISRDSAKNAVNLQMELVESDDTAVYYCAAKHSTVAGLTHEYDYWGQGTQVTVSS

SEQ ID NO: 2216 - protein, 120 aa, Artificial
  Nanobody sequence
EVQLVESGGGLVQPGGSLRLSCAASGSAFSIKSMGWYRQAPGKQRELAAVIISSGTTTYADSVKGRFTISRDSAKNTVYLQMDSLKPEDTAVYVCNAVYVSTWGNGYDYWGQGTQVTVSS

SEQ ID NO: 2217 - protein, 126 aa, Artificial
  Nanobody sequence
EVQLVESGGGLVQAGGSLGLSCAAAGRTFSSSLMGWFRQAPGKEREFVAAITDNGGSTYYADSVKGRFTISRDNAKNSVYLQMNSLKPEDTAIYYCAARRSGYYSLSTSPHQYAYWGQGTQVTVSS

SEQ ID NO: 2218 - protein, 124 aa, Artificial
  Nanobody sequence
EVQLVESGGGLVQAGGSLRLSCAASGRAFSSYAMGWFRQAPGKERDFVAAITSSGSTNYADSVKGRFTISRDNAKNTVYLQMNSLKPEDTAVYYCGARVNYAAYSRLEHDYHYWGQGTQVTVSS

SEQ ID NO: 2219 - protein, 125 aa, Artificial
  Nanobody sequence
EVQLVESGGGLVQAGGSLRLSCATSGRTFSTYASMGWFRQTPGKEREFVAAITSSGSTNYADSVKGRFTISRDNAKNTVYLQMNSLKPEDTAVYYCGARVNYAAYSRLEHDYHYWGQGTQVTVSS

SEQ ID NO: 2220 - protein, 116 aa, Artificial
  Nanobody sequence
EVQLVESGGGLVQPGGSLRLSCAASGNIDGIITMGWYRQRPGKPREWVGTINSGGDTNYAGSVKGRFTIARDDAKNTMYLQMNGMKPEDTAVYYCKMNRAGIYEYWGQGTQVTVSS

SEQ ID NO: 2221 - protein, 123 aa, Artificial
  Nanobody sequence
EVQLVESGGGLVQTGGSLRLSCAASGPTFSDYAIGWFRQAPGKEREFVAAISSSGISTIYGDSVKGRFDISRDNAKNTVYLQMNRLKPEDTAVYYCAARLFMATPNQGQYYYWGQGTQVTVSS

SEQ ID NO: 2222 - protein, 123 aa, Artificial
  Nanobody sequence
EVQLVESGGGLVQAGDSLRLSCAASGFTFSNHIMGWFRQAPGKERELIAHITWNGGSTYYADSVKGRFAISRDNALNTVYLQMNSLKPEDTAVYYCAARPSYSTNNVKSYRYWGQGTQVTVSS

SEQ ID NO: 2223 - protein, 124 aa, Artificial
  Nanobody sequence
EVQLVESGGGLVQAGSSLRLSCALSGRTFSDYAIGWFRQAPGKEREFVAAISGWSGGTTNYADSVKGRFTISRDNGKNTVDLRMNSLKPEDTAVYYCAARPAVVHTRKESYPYWGQGTQVTVSS

SEQ ID NO: 2224 - protein, 125 aa, Artificial
  Nanobody sequence
EVQLVESGGGLVQAGGSLRLSCIASERTFSSAGVGWFRQAPGKERDFVAAISWNGVTIYYADSVKGRFTISRDNAKNTVYLQMNSLKPEDTAVYYCAARINYSVLTTTSSSYHYWGQGTQVTVSS

SEQ ID NO: 2225 - protein, 123 aa, Artificial
  Nanobody sequence
EVQLVESGGGLVQPGDSLRLSCSASEGTLSRSRVAWFRQAPGKEREFVTVISGVGTSYADSVKGRFTISRDDAKNTVYLQMNSLKAEDTAIYYCAADFRSTWLSSSGSSYTYWGQGTQVTVSS

SEQ ID NO: 2226 - protein, 121 aa, Artificial
  Nanobody sequence
EVQLVESGGGLVQPGGSLTLSCVGSGRRFSADVMGWYRQAPGKQREFVASISSGSAINYADSVKGRFTVSRDNAQNTVYLQMNSLKIEDTGVYYCNARRIVNVEGAYRDYWGQGTQVTVSS

SEQ ID NO: 2227 - protein, 121 aa, Artificial
  Nanobody sequence
EVQLVESGGGLVQPGGSLPLSCAASGSIFRMNDMGWYRQAPGKQRERVATLTSAGNTNYADSVKGRFTISGDDARNTVYLQMNSLNPEDTAVYYCNAKVVVAVEGAKYDYWGQGTQVTVSS

SEQ ID NO: 2228 - protein, 122 aa, Artificial
  Nanobody sequence
EVQLVESGGGLAQAGGSLRLSCAVFGRSRYGMAWFRRAPGKEREFVAGIAWNGASIGSADSVRGRFTISRDNSENTVYFEMGSLKPEDTAVYYCAICRISWCAGAESDYGYWGQGTQVTVSS

SEQ ID NO: 2229 - protein, 127 aa, Artificial
  Nanobody sequence
EVQLVESGGGQVQAGGSLRLSCTESGRAFNTRAMGWFRQAPEKEREFVAGITMSGFNTRYADSVKGRFTISRDNAKGTVYLQMSSLKPEDTAVYYCAADSITDRRSVAVAHTSYYYWGQGTQVTVSS

SEQ ID NO: 2230 - protein, 123 aa, Artificial
  Nanobody sequence
EVQLVESGGGLVQAGGSLGLSCAASGRTFSNYAMGWFRQAPGKEREFVAGISWSGGHTFYADSVKGRFTISRDNTKNTVYLQMNSMRPEDTAVYYCAARLSSVAVASTRYDYWGQGTQVTVSS

SEQ ID NO: 2231 - protein, 125 aa, Artificial
  Nanobody sequence
EVQLVESGGGLVQAGDSLRLSCVASGGTFGSYAMGWFRQAPGKEREFVATIDWSGDTAFYADSVKGRFTISRDIANDVVYLQMNSLEPEDTAVYYCARNRQSGVASENLRLYTYWGQGTQVTVSS

SEQ ID NO: 2232 - protein, 123 aa, Artificial
  Nanobody sequence
EVQLVESGGGLAQAGDSLRLSCVDSGSSFSAYAMGWFRQAPGKEREFVAAVSWDGRNTYYADSVKGRFTISRDNAKNTLYLQTTSLRPEDTGVYYCAEDKQSGVSVNPKYAYWGQGTQVTVSS

SEQ ID NO: 2233 - protein, 118 aa, Artificial
  Nanobody sequence
EVQLVESGGGLVQAGGSLRLSCAVSGGTFESDTMAWFRQAPGKEREFVARVSWIRTTYYSDSVKGRFTISKDNAKNTVYLQMNSLKPEDTAVYYCAAQTLGRSLYDYWGQGTQVTVSS

SEQ ID NO: 2234 - protein, 126 aa, Artificial
  Nanobody sequence
EVQLVESGGGLVQAGGSLRLSCAASGRTFSSNAMAWFRQAPGNERELVSAIGWSGASTYYIDSVEGRFTISRDNAKNTVYLQMNSLKPEDTAVYYCAASRYSGGVATARRSEYHYWGQGTQVTVSS

SEQ ID NO: 2235 - protein, 125 aa, Artificial
  Nanobody sequence
EVQLVESGGGLVQAGDSLRLSCVASGDSFNTYTMGWFRQAPGKEREFVAAIRWSGGTTFYGDSVKGRFTISRDYAKNTWYLQMNTLKPEDTAAYYCAAVATYSRNVGSVRNYDYWGQGTQVTVSS

SEQ ID NO: 2236 - protein, 126 aa, Artificial
  Nanobody sequence
EVQLVESGGGLVQAGGSLRLSCVVSEGTFSSYSMGWFRQAPGKDREFVSAITWNGTRTYYRDSVKGRFTISRDNAKNTVQLQMNSLKPEDTAVYYCAVSQPLNYYTYYDARRYDYWGQGTQVTVSS

SEQ ID NO: 2237 - protein, 124 aa, Artificial
  Nanobody sequence
EAQLVESGGGLVQAGGSLRLSCTASGRTYSTTMGWFRQAPGKEREFVAAIRWSGGSAFYADSVKGRFTISRDNAKNTVYLQMTSLMPEDTAVYYCADTPVYYQRYYDQNAYDYWGQGTQVTVSS

SEQ ID NO: 2238 - protein, 118 aa, Artificial
  Nanobody sequence
EVQLVESGGGLVQAGGSLRLSCAASGRAFSSYAMGWFRQAPGKERDFVAAITSSGSTNYADSVKGRFTISRDNAKNTVYLQMNSLKPEDTAVYYCAAKYYSYYAYDYWGQGTQVTVSS

SEQ ID NO: 2239 - protein, 124 aa, Artificial
  Nanobody sequence
EVQLVESGGGLVQAGGSLRLSCAASGGTFSVYHMAWFRQAPGKEREFVAAIRSSGGLFYALSVSGRFTISRDNAKDTMYLQMNVLKPEDTAVYYCAASPVYYIDYSSQYKYGYWGQGTQVTVSS

SEQ ID NO: 2240 - protein, 124 aa, Artificial
  Nanobody sequence
EVQLVESGGGLVQAGGSLRLSCAASGGAFGVYHMGWFRQAPGKEREFVAAIRSGGTTLYEDSVKGRFTISRDNAKNTVYLRMNSLKPEDTAVYYCATQIYYRTNYYSQNAYDYWGQGTQVTVSS

SEQ ID NO: 2241 - protein, 124 aa, Artificial
  Nanobody sequence
EVQLVESGGGLVQAGGSLRLSCAASGGTFGVYHMGWFRQAPGKEREFVAVIRSGGTTLYADSVKGRFTISRDDAKNTVYLQMNSLKPEDTAVYLCAAQIYYRTNYYSQNNYDYWGQGTQVTVSS

SEQ ID NO: 2242 - protein, 124 aa, Artificial
  Nanobody sequence
EVQLVESGGGLVQAGGSLELSCAASGGAFGVYHMGWFRQAPGKEREFVAAIRSGGTTLYEDSVKGRVTISRDDAKNTVYLRMNSLKPEDTAVYYCAAQIYYRTNYYSQNVYDYWGQGTQVTVSS

SEQ ID NO: 2243 - protein, 124 aa, Artificial
  Nanobody sequence
EVQLVESGGGLVQAGGSLRLSCAASGGTFGVYTMAWFRQAPGKEREFVAAIRSGATTLYEDSVKGRFTISRDDAKNTVYLRMNSLKPEDTAVYYCAAQIYYRTNYYSQNEYDYWGQGTQVTVSS

SEQ ID NO: 2244 - protein, 124 aa, Artificial
  Nanobody sequence
EVQLVESGGGLVQAGGSLRLSCAASGGTFGVYHMGWFRQAPGTEREFVAVIRSGGTTLYEDSVKGRFTISRDNAKNTVYLRMNSLKPEDTAVYYCAAQIYYRTNYSSQSNYDYWGQGTQVTVSS

SEQ ID NO: 2245 - protein, 124 aa, Artificial
  Nanobody sequence
EVQLVESGGGLVQAGGSLKLSCAVSGRTIVPYTMAWFRQAPGKEREFVAVTRSGGTTFYADSAKGRFTIARDDAKNTVYLQMNSLKPEDTAVYYCALATAYRTNYSSRDKYDYWGQGTQVTVSS

SEQ ID NO: 2246 - protein, 122 aa, Artificial
  Nanobody sequence
EVQLVESGGGLVQPGGSLRLSCAASGFTFSSYAMSWVRQAPGKGLEWVSAINSGGGSTSYADSVKGRFTISRDNAKNTLYLQMNSLKPEDTAVYYCAKYLSFYSDYEVYDYWGQGTQVTVSS

SEQ ID NO: 2247 - protein, 120 aa, Artificial
  Nanobody sequence
EVQLVESGGGLVQAGGSLRLSCAASGGTFSSGVMAWFRQSPGEEREFLALITRNGETKKTADSVKGRFTISRDNAKNGVSLQMDSLKAEDTAVYYCASDPTYGSGRWTYWGQGTQVTVSS

SEQ ID NO: 2248 - protein, 128 aa, Artificial
  Nanobody sequence
EVQLVESGGGLVQAGGSLRLSCAASRHTFSGYAMGWFRQAPGKEREFVAAIRWSGGITYYADSVKGRFTISSDNAKNTVYLQMNSLKPEDTALYYCARSVTYYSGSHAYTQEGGYARWGQGTQVTVSS

SEQ ID NO: 2249 - protein, 126 aa, Artificial
  Nanobody sequence
EVQLVESGGGLVQTGGSLRLSCAASGRAFSTYGMGWFRQAPGKAREFVAAISRSGTGTYYAGSMKGRFTISRDDAKNTVYLQMNSLKPEDTAVYYCAARQPYASGSHYSSTQYTYWGQGTQVTVSS

SEQ ID NO: 2250 - protein, 119 aa, Artificial
  Nanobody sequence
EVQLVESGGGLVQAGGSLRLSCAASGRSFNDYTMGWFRQTPGKEREFVARVWWNGGSAYYADSVKGRFTISIDNAKNTVYLQMNNLTPEDTAVYYCAALYRGRSVYDDWGQGTQVTVSS

SEQ ID NO: 2251 - protein, 127 aa, Artificial
  Nanobody sequence
EVQLVESGGGLVRAGTSLRLSCADSARTFSSAAMGWFRQAPGKEREFVSAISPIGSSKYYADSVKGRFTISRDNAKNTVYLQMDSLKPEDTAVYYCAASSYGSTYYSQGRAYYYDYWGQGTQVTVSS

SEQ ID NO: 2252 - protein, 124 aa, Artificial
  Nanobody sequence
EVQLVESGGGLVQPGGSLRLSCTVFGRTFSGDVIGWFRQAPGKEREFVAAISTSGGGTDSADSVKGRFTISKENAKNTVYLQMTILKPEDTAVYYCASSPYGPLYRSTHYYDYWGQGTQVTVSS

SEQ ID NO: 2253 - protein, 125 aa, Artificial
  Nanobody sequence
EVQLVESGGGLVQAGGSLGLSCAASGRTVSTMGWFRQAPGKEREFVTAITWSGDSTNFADSVKGRFTISRDSAKDTVYLQMNNLKPEDTAVYYCAATTYYSGSYISTLSTSYNYWGQGTQVTVSS

SEQ ID NO: 2254 - protein, 111 aa, Artificial
  Nanobody sequence
EVQLVESGGGLVQAGGSLRLSCVASGRTLSTTGVGWFRQAPGKGRESVATIFVGGTTYYSDSVKGRFTISRDNAKNAVNLQMSNLKPEDTALHYCTIGSYRGQGTQVTVSS

SEQ ID NO: 2255 - protein, 111 aa, Artificial
  Nanobody sequence
EVQLVESGGGLVQAGGSLRLSCVASGRTLSTTGVGWFRQAPGKERESVATIFVGGTTYYSDSVKGRFTISRDNARNAVNPQMNNLKPEDTAVYYCTIGSYRGQGTQVTVSS

SEQ ID NO: 2256 - protein, 127 aa, Artificial
  Nanobody sequence
EVQLVESGGGLVQAGGSLRLSCAASGRTFSRDVMGWFRQAPGKEREFVAAKTWSGASTYYADSVRGRFTISRDNAKNAVYLQMNSLKPEDTAVYYCAARDSSTLDSTYYVGGSYNYWGRGTQVTVSS

SEQ ID NO: 2257 - protein, 111 aa, Artificial
  Nanobody sequence
EVQLVESGGGLVQAGGSLRLSCVASGRTLSTTGVGWFRQAPGKERESVATIFVGGTTYYSDSVKGRFTISRDNAKNAVNLQMSNLKPEDTALYYCTIGSYRGQGTQVTVSS

SEQ ID NO: 2258 - protein, 125 aa, Artificial
  Nanobody sequence
EVQLVESGGGLVQAGGSLRLSCVRSGGYFGSYHIGWFRQAPGNEREFVAAITWNGASTSYADSVKGRFTISRSIAENTVYLQMNKVKPEDTAVYYCAARMYGSDWLPRPEDFDSWGQGTQVTVSS

SEQ ID NO: 2259 - protein, 120 aa, Artificial
  Nanobody sequence
EVQLVESGGGLVQPGGSLRLSCAASGSIFSINAMGWYRPAPGKQRELVARITSTGSTNYADSVKGRFTISRDNAKNTVYLQMNSLKPEDTAVYYCNADVSPSYGSRWYGWGQGTQVTVSS

SEQ ID NO: 2260 - protein, 127 aa, Artificial
  Nanobody sequence
EMQLVESGGGLVQAGGSLRLSCATSERTFSTYTMAWFRQAPGKEREFVVAIKSSDNSTSYRDSVKGRFTISRDNAKSTMYLQMNSLKPEDTAVYYCAARREYSTIYTARYPGEYVYWGQGTQVTVSS

SEQ ID NO: 2261 - protein, 116 aa, Artificial
  Nanobody sequence
EVQLVESGGGLVQPGGSLRLSCAASRSIFSPNVVGWYRQAPGKQRELVAAVTSGGITNYADSVKGRFTISRDNAKNTLYLQMNSLKAEDTAVYYCNARERGIYDSWGQGTQVTVSS

SEQ ID NO: 2262 - protein, 125 aa, Artificial
  Nanobody sequence
EVQLVESGGGLVQAGGSLRLSCAASGGTFSRYKMGWFRQAPGKEREFVAASRWSGGIKYHADSVKGRFTISRDDAKNSIYLQMNTLKPEDTAVYYCAADDYLGGDNWYLGPYDSWGQGTQVTVSS

SEQ ID NO: 2263 - protein, 124 aa, Artificial
  Nanobody sequence
EVQLVESGGGLVQAGGSLRLSCAVSGFLFDSYAMGWFRQAPGKEREFVAAIRWSGSATDYSDSVKGRFTISRDNAKNTVYLQMNSLIPEDTAVYYCAARKTYRSLTYYGEYDSWGQGTQVTVSS

SEQ ID NO: 2264 - protein, 125 aa, Artificial
  Nanobody sequence
EVQLVESGGGLVQPGGSLRLSCAASRSIRSVSVMGWYRLAPGNQRELVATITADGITNYADSVKGRFTVSRDNGRNTVYLQMNSLKPEDTAVYYCNVDRLLYYSSGYYQTSVDVWGQGTQVTVSS

SEQ ID NO: 2265 - protein, 125 aa, Artificial
  Nanobody sequence
EVQLVESGGALVQPGGSLRLSCAASGSIRSINTMGWYRQAPGNQREFVAAVTEGGTTSYAASVKGRFTISRDKAKNTVLLQMDSLKPEDTAVYYCNADRFLYYSAGRYDTGSDIWGQGTQVTVSS

SEQ ID NO: 2266 - protein, 125 aa, Artificial
  Nanobody sequence
EVQLVESGGALVQPGGSLRLSCAASDSIRSINIMGWYRQAPGKQREFVAAVTEDGSINYAESVKGRFTISRDKAKNALYLQMNSLKPEDMAVYYCNADRVLYYSDSRYYTGSNYWGQGTQVTVSS

SEQ ID NO: 2267 - protein, 127 aa, Artificial
  Nanobody sequence
EVQLVESGGGLVQPGGSLRLSCAASGSSASINTMGWYRQAPGEQRELVAEITEGGIINYTDSVKGRFTISRDNAKNTVYLEMNNLKPEDTAVYYCNADRALYRNYSDGRYYTGYDYWGQGTQVTVSS

SEQ ID NO: 2268 - protein, 115 aa, Artificial
  Nanobody sequence
EVQLVESGGGLVQPGGSLRLSCAASRNIFDFNDMGWYRQGPGKEREFVALINVGGVAKYEDSVKGRFTISRDNAENTVYLQMNNLKPEDMAVYYCNARILSRNYWGQGNQVTVSS

SEQ ID NO: 2269 - protein, 127 aa, Artificial
  Nanobody sequence
EVQLVESGGGLVQAGGSLRLSCAASGGTFSGRGMGWFRQAPGKEREFVAAVSWSGGNTYYADSVKGRFTISRDNAKSTVYLQMDSLKPEDTAVYYCAASRRFYSGLYYYTDDAYEYWGQGTQVTVSS

SEQ ID NO: 2270 - protein, 127 aa, Artificial
  Nanobody sequence
EVQLVESGGGLVQAGGSLSLSCAASGGTFNGRAVGWFRQAPGEEREFVTGISWSGGSTDYADSVKGRFTISRDNSKNTVSLQMNSLKPEDTAVYYCAASRRFYSGLVYYSVDAYENWGQGTQVTVSS

SEQ ID NO: 2271 - protein, 130 aa, Artificial
  Nanobody sequence
EVQLVESGGGLVQAGGSLRLSCAISGRTLSGRAMGWFRQAPGKEREFREFVAATSWSGGSKYVADSVTGRFTIFRDNAENTAYLQMNSLNPEDTAVYYCAVTKRYYSIKYYSTVEDYEYWGQGTQVTVSS

SEQ ID NO: 2272 - protein, 128 aa, Artificial
  Nanobody sequence
EVQLVESGGGLVQAGGSLRLSCAVSGRTFNNDHMGWFRQAPGTERELVAATGRRGGPTYYADSVKGRFTISRDNAESTVYLQMNSLKAEDTAVYYCAANRYYCSTYGCLSTPRQYDYWGQGTQVTVSS

SEQ ID NO: 2273 - protein, 120 aa, Artificial
  Nanobody sequence
EVQLVESGGGLVRPGGSLRLSCATSGSDIGINAMGWYRQAPGNQRELVATITGSTGTTYADSVKGRFAISRDGAKNTVYLQMDSLKPEDTAVYYCNLRVYTGTYGGRNYWGQGTQVTVSS

SEQ ID NO: 2274 - protein, 118 aa, Artificial
  Nanobody sequence
EVQLVESGGGLVQAGGSLRLSCAASGRALINYAMGWFRQAPGKEREFVSAINWSGSHTDYGDSVKGRFAISRDNAKNTVYLQMHSLKPEDTAVYHCATGYSLPAFDSWGPGTQVTVSS

SEQ ID NO: 2275 - protein, 118 aa, Artificial
  Nanobody sequence
EVQLVESGGGVVQAGGSLRLSCAPSGRTFSSYVMGWVRQAPGKAREFVAGITRNSGRTRYADSVKGRFTISRDNADNTVTLQMNSLKPEDTAVYYCAGGIDLYTFHYFGQGTQVTVSS

SEQ ID NO: 2276 - protein, 118 aa, Artificial
  Nanobody sequence
EVQLVESGGGLVQAGGSLRLSCAPSGRTFSSYVMGWVRQAPGKAREFVAGITRNSIRTRYADSVKGRFTISRDNADNTVTLQMNSLKPEDTAVYYCAGGIDLYTFDYFGQGTQVTVSS

SEQ ID NO: 2277 - protein, 126 aa, Artificial
  Nanobody sequence
EVQLVESGGGLVQAGGSLRLSCAASGRPVNNYIMGWFRQALGQGREFVAAINRNGATAAYADSVKGRFTISRDNAEDLLYLQMNLLKPEDTAVYYCAANSDSGFDSYSVWAAYEYWGQGTQVTVSS

SEQ ID NO: 2278 - protein, 121 aa, Artificial
  Nanobody sequence
EVQLVESGGGLVQAGGSLRLSCAASGRTFSAYAMGWFRQAPGKERESVATIRWTGGSSSTSYADSVKGRFTISKNTAENTVYLQMNSLKPEDTAVYYCAVLLTVWDTYKYWGQGTQVTVSS

SEQ ID NO: 2279 - protein, 123 aa, Artificial
  Nanobody sequence
EVQLVESGGGLVQAGGSLRLSCAASGRTYNMAWFRQAPGKEREFVAAMNWSGGSTKYAESVKGRFTISRANDNNPLYLQMNTLKPEDTAVYYCAATNRWYTGVYDLPSRYEYWGQGTQVTVSS

SEQ ID NO: 2280 - protein, 123 aa, Artificial
  Nanobody sequence
EVQLVESGGGLVQAGGSLRLSCTASGQTFNMGWFRQAPGKEREFVAAISWSQYNTKYADSVKGRFTISRDNAINSLYLQMDTLKPEDTAVYYCAATNRWFSAVYDLPSRYTYWGQGTQVTVSS

SEQ ID NO: 2281 - protein, 114 aa, Artificial
  Nanobody sequence
EVQLVESGGAFVQPGGSLRLSCAASGSDVWFNVMGWYRQGPGQQLELVASITYGGNINYGDPVKGRFSISRDNALKTVYLQMNSLKPEDTAVYYCYADLPSRLWGQGTQVTVSS

SEQ ID NO: 2282 - protein, 123 aa, Artificial
  Nanobody sequence
EVQLVESGGGLVQAGGSLRLSCTASGRAFNMGWFRQAPGKEREFVAGVNWGGGSTKVADSVKERFTISRDYDNSPVYLQMNTLKPEDTAVYYCAATSRWYSAVYDLPTRYDYWGQGTQVTVSS

SEQ ID NO: 2283 - protein, 124 aa, Artificial
  Nanobody sequence
EVQLVESGGGLVQAGGSLRLSCQLSGGTVSDLHMGWFRQAPGKEREFVGFTRWPSITYIAEHVKGRFTISRDNAKNTVYLQMNSLEREDTAVYYCAADRSYSIDYRHPDSYSYWGQGTQVTVSS

SEQ ID NO: 2284 - protein, 123 aa, Artificial
  Nanobody sequence
EVQLVESGGGLVQAGGSLRLSCAASGSIFRVNHMGWYRQAPGKQREFVAAITSDHITWYADAVKGRFTISRDNAKNTVTLQMNSLRPEDTAVYYCAADPLLFYGVGSADVDYWGQGTQVTVSS

SEQ ID NO: 2285 - protein, 117 aa, Artificial
  Nanobody sequence
EVQLVESGGGLVQPGGSLRLSCAGSGNIVRDNTMAWYRQAPGNQRDLVATINVGGGTYYAGPVKGRFTISRDNAKNSVYLQMNSLKPEDTSVYYCNVISGLVQRDYWGQGTQVTVSS

SEQ ID NO: 2286 - protein, 124 aa, Artificial
  Nanobody sequence
EVQLVESGGGLVQAGGSLRLSCAASGRTFSMYLMGWFRQAPGKEREFVSTINRRGGNTYYADSVKGRFTISRDNARNTVYLQMNSLKPEDTAVYYCAAGGHLLGYDVQWEPDYWGQGTQVTVSS

SEQ ID NO: 2287 - protein, 126 aa, Artificial
  Nanobody sequence
EVQLVESGGGLVQAGGSLRLSCAASGRTFERYAMGWFRQAPGKEREFVATISWSGGRDTVYADSVKGRFTISRDNAKNTVYLQMNSLKPEDTAVYYCAAHKRTYELGAHSTDFGSWGQGTQVTVSS

SEQ ID NO: 2288 - protein, 126 aa, Artificial
  Nanobody sequence
EVQLVESGGDLVQPGESLRLSCAVSGVTVDYSGIGWFRQAPEKEREAVSCIESGDGTTTYVDSVKGRFTISRDNAKNAVYLQMNSLKPEDTGVYYCATAVFVDSGDFSVCRGVGYWGKGTQVTVSS

SEQ ID NO: 2289 - protein, 121 aa, Artificial
  Nanobody sequence
EVQLVESGGGLVQAGASLRLSCAASGRTFSRYDIGWFRQAPGKGREFVAAINWSGGTTSFGDSVKGRFTISRDNAKNTVYLQMNSLKPEDTAVYYCAALRSWPRGVDSGSWGQGTQVTVSS

SEQ ID NO: 2290 - protein, 123 aa, Artificial
  Nanobody sequence
EVQLVESGGGLVQTGGSLRLSCAASGRTFSGSRMGWFRQAPGKEREFVAAIRWSGGITWYAESVKSRFTISRDNTKNTIDLQINSLKPEDTAVYYCAADVIYKNIGSGSFDYWGQGTQVTVSS

SEQ ID NO: 2291 - protein, 123 aa, Artificial
  Nanobody sequence
EVQLVESGGGLVQAGGSLRLSCAASGRTFSGSRMGWLRQAPGKEREFVAAVRWSGGITWYAESVKGRFTISRDNTKNTIDLQINSLKPEDTAVYYCAADVIYKNIGSGSFDYWGQGTQVTVSS

SEQ ID NO: 2292 - protein, 123 aa, Artificial
  Nanobody sequence
EVQLVESGGGLVQAGGSLRLSCAVSGLTFSSYAMGWFRQAPGKVREFVATISRSGGRTSYADSVKGRFIVSRDNAKNTADLQMNDLKPEDTAVYYCGASKWYGGFGDTDIEYWGQGTQVTVSS

SEQ ID NO: 2293 - protein, 123 aa, Artificial
  Nanobody sequence
EVQLVESGGGLVQAGGSLRLSCAVSGLTFSTYAMGWFRQAPGKVREFVATISRSGGRTSYADSVKGRFIVSRDNAKNTADLQMNELKPEDTAVYYCGASKWYGGFGDTDIEYWGQGTQVTVSS

SEQ ID NO: 2294 - protein, 113 aa, Artificial
  Nanobody sequence
EVQLVESGGGLVQPGGSLRLSCAASGITFRFKAMGWFRQGPGKRRELVARIAGGSTNYADSVKGRFTISRDDAKNTVFLQMNSLKPEDTAVYYCNVDGPFGNWGQGTQVTVSS

SEQ ID NO: 2295 - protein, 125 aa, Artificial
  Nanobody sequence
EVQLVESGGGLVQAGGSLRLSCTASGGTFGSYALGWFRQSPGKERESVAAIDWDGSRTQYADSVKGRFTISRENVKDTMYLQMNSLQAEDTGVYYCVRSRHSGNTLSFSLKYDYWGQGTQVTVSS

SEQ ID NO: 2296 - protein, 125 aa, Artificial
  Nanobody sequence
EVQLVESGGGLVQAGGSLRLSCAASEPTFSSVAMGWFRQGPGKEREFAATITWSGDSTYVTDSVKGRFTISRDNARNTAYLQMDSLRPEDTAVYSCAARRWSGTLSLFDNEYYYWGQGTQVTVSS

SEQ ID NO: 2297 - protein, 121 aa, Artificial
  Nanobody sequence
EVQLVESGGGLVQAGGSLRLSCVASGRTSSYYHMAWFRQAPGKEREFIAAINLSSGSTYYPDSVKGRFTISRGNAKNTVNLQMNSLKPEDTAVYYCAADNYRDSYLEYDYWGQGTQVTVSS

SEQ ID NO: 2298 - protein, 125 aa, Artificial
  Nanobody sequence
EVQLVESGGGLVQAGGSLSLSCAASGRTFSNYRMAWFRQAPRKEREFVAAISRSGESTYFADSMKGRFTISRDNTESTGYLQMNNLKPEDTAVYYCAASWDHGDYVDGGFFYDYWGQGTQVTVSS

SEQ ID NO: 2299 - protein, 124 aa, Artificial
  Nanobody sequence
EVQLVESGGGLVQAGGSLRLSCAASGRTFSRYAMHWFRQAPGSERDFVAGISWDGGSTFYANSVKGRFTISRDNAKNMVYLQMNSLKPEDTAVYYCAAAGSAGPPSIDRQYDYWGQGTQVTVSS

SEQ ID NO: 2300 - protein, 118 aa, Artificial
  Nanobody sequence
EVQLVESGGGLVQPGGSLRLSCAASGSSLSFNAMGWSREAPGKRRELVARIISDDSTLYADSVKGRFTISRDYAKNTAYLQMNSLKPEDTAVYYCVADVRDSIWRSYWGQGTQVTVSS

SEQ ID NO: 2301 - protein, 120 aa, Artificial
  Nanobody sequence
EVQLVESGGGLVQAGGSLRLSCAASGRALSNYAMRWFRQAPGKEREFVATINWSGSHTDYADSVKGRFTISRDNAENTVYLQMNSLTPEDTAVYYCASGWGATQAQSGFWGQGTQVTVSS

SEQ ID NO: 2302 - protein, 120 aa, Artificial
  Nanobody sequence
EVQLVESGGGLVQAGGSLRLSCAASGRALISFAMRWFRQAPGKEREFVAAINWSGTHTDYADSVKGRFTISRDNAENTVYLLMNSLIPEDTAVYYCATGWGATQAQHGFWGQGTQVTVSS

SEQ ID NO: 2303 - protein, 120 aa, Artificial
  Nanobody sequence
EVQLVESGGGLVQAGGSLRLSCAASGRTSSGYGMGWFRQAPGKEREFVAAVGWYGSTYFADSVKGRFTIYRDNAQNTMYLQMNSLKPEDTAVYYCAASSSLATISQPSSWGQGTQVTVSS

SEQ ID NO: 2304 - protein, 118 aa, Artificial
  Nanobody sequence
EVQLVESGGGLVQPGGSLRLSCAHSGRAFSLRTMGWYRQAPGNQRELVALISAGDSTYYPDSVKGRFTVSRDNAKNTVYLQMNSLKPEDTAVYYCNAKAVTSRDHEYWGQGTQVTVSS

SEQ ID NO: 2305 - protein, 128 aa, Artificial
  Nanobody sequence
EVQLVESGGGLVQAGGSLRLSCAASGRTFSRYAMGWFRQAPGKEREFVAAISWTGGSSYYGDSVKGRSTISRENAENTVYLQMNSLKPEDTAVYYCAANSDEFYSGTLKLQSRMVEYWGQGTQVTVSS

SEQ ID NO: 2306 - protein, 118 aa, Artificial
  Nanobody sequence
EVQLVESGGGLVQAGGSLRLSCAASGGIFSSHAISWFRQAPGKAREFVAAINWSGSHRDYADSAKGRFTISRDNAKKTAYLQMNSLRPEDTAVYYCVGGWKTDEYVKWGQGTQVTVSS

SEQ ID NO: 2307 - protein, 120 aa, Artificial
  Nanobody sequence
EVQLVESGGGLVQAGGSLRLSCAASGRIFSNYAWSWFRQAPGKERGFVAAINWSGGYTDYADSVKGRFTISRDNTKNTVYLQMNSLKPEDTAVYYCRPGWVTPSYEYGNWGQGTQVTVSS

SEQ ID NO: 2308 - protein, 128 aa, Artificial
  Nanobody sequence
EVQLVESGGGLVQAGGSLRLSCAASGRTFISSPMGWFRQAPGKEREVVAATTRSGGLPYYSDSVKGRFTISRDNAKNTVDLQMSSLKPEDTAAYYCAADQKYGMSYSRLWLVSEYEYWGQGTQVTVSS

SEQ ID NO: 2309 - protein, 115 aa, Artificial
  Nanobody sequence
EVQLVESGGGLVQPGGSLRLSCAASGSIDSIHVVGWYRKAPGKQREVVAYIGTAGATHYADSVKGRFTISRDNAENLVYLQMNNLKPEDTAVYYCSAGWGDSAYWGQGTQVTVSS

SEQ ID NO: 2310 - protein, 123 aa, Artificial
  Nanobody sequence
EVQLVESGGGLVQSGGSLRLSCVASGTIVSINATSWYRQAPGNQRELVATIIGDGRTHYADSVKDRFTISRDAAANLVYLQMNSLKPSDTAIYSCNANGIESYGWGNRHFNYWTVGTQVTVSS

SEQ ID NO: 2311 - protein, 119 aa, Artificial
  Nanobody sequence
EVQLVESGGGMVQAGGSLRLSCAASGLTLSNYGMGWFRQAPGKEREFVSSINWSGTHTYDADFVKGRFIISRDNAKNTVYLQINSLKPEDTAVYYCAAGGWGTGRYNYWGQGTQVTVSS

SEQ ID NO: 2312 - protein, 122 aa, Artificial
  Nanobody sequence
EVQLVESGGGLVQAGGSLRLSCAASGRTFISNYAMGWFRQAPGKEREFVATINWSGSHSDYADSVKGRFTISRDNAKNTVYLQMNNLKSEDTAVYYCAPGWGTAPLSTSVYWGQGTQVTVSS

SEQ ID NO: 2313 - protein, 123 aa, Artificial
  Nanobody sequence
EVQLVESGGGLVQAGGSLRLSCVASGRTFSGYSVGWFRQSPGKEREFVGGINWSGRTYYVDSVKGRFTFSRDNAKNTVYLQMNSLKPEDTAIYLCAVDRFNTIANLPGEYDYWGQGTQVTVSS

SEQ ID NO: 2314 - protein, 135 aa, Artificial
  Nanobody sequence
EVQLVESGGGLVQDGGSLRLSCAASGQLANFASYAMGWFRQAPGKAREFVAAIRGSGGSTYIADPARSTYYADFVKGRFTISRDNAKNTVYLQMNSLKPEDTAVYYCACETFNSISNLPGEYDYWGQGTQVTVSS

SEQ ID NO: 2315 - protein, 124 aa, Artificial
  Nanobody sequence
KVQLVESGGGLVQAGGSLRLSCAASGRTFSNYSVGWFRQAPGKEREFVAALSKDGARTYYAASVKGRFTIYRDNAKNVVYLQMSVLNGEDTAVYYCAADHFTFMSNLPSEYDYWGQGTQVTVSS

SEQ ID NO: 2316 - protein, 124 aa, Artificial
  Nanobody sequence
EVQLVESGGGLVQAGGSLTLSCVISGLTLESHAMGWFRQAPGEEREFVATIRWSGSATFYSDSVKGRFTISRDNAKNTVYLQMNSLKPEDTAVYYCAARKIYRSLSYYGDYDSWGQGTQVTVSS

SEQ ID NO: 2317 - protein, 123 aa, Artificial
  Nanobody sequence
EVQLVESGGGLVQPGGSLRLSCAASGRTFSDLALGWFRRAPGKEREHVAAISSSGVTTIYADSVRGRFTISRDEAKNTVYLEMNSLKTDDTAVYYCAARLTMATPNQSQYYYWGQGTQVTVSS

SEQ ID NO: 2318 - protein, 114 aa, Artificial
  Nanobody sequence
EVQLVESGGGSVQPGGSLRLSCVASGSISSTNAMGWHRQVSGKERELVAIVTDGFTNYADFAKGRFTISRDNAKTTVYLQMNSLQPEDTARYYCRYSGIGTDNWGQGIEVTVSS

SEQ ID NO: 2319 - protein, 114 aa, Artificial
  Nanobody sequence
EVQLVESGGGSVQPGGSLRLSCVASGSISSVNAMGWHRQVPGKQRELVAIVTDGFTNYADFAKGRFTISRDNAKTTVYLQMNSLQPEDTARYYCRYSGIGTDNWGQGIEVTVSS

SEQ ID NO: 2320 - protein, 122 aa, Artificial
  Nanobody sequence
EVQLVESGGGLVQPGGSLRLSCAASGNIKSIDVMGWHRQAPGKERELVSDISFGGNTNYANSVKGRFTISRDNAKNTVYLQMNSLKPEDTAVYYCYADILYKTDIYYRNDFWGQGTQVTVSS

SEQ ID NO: 2321 - protein, 131 aa, Artificial
  Nanobody sequence
EVQLVESGGGLVQAGGSLRLSCAASGFSFADYAIGWFRQAPGKEREGVSCIANSEGTKYYADSAQGRLPISSDNAKKTVYLQMDSLKPEDTAVYYCAALPYTICPVVVKKGAVYYGVDDYWGKGTQVTVSS

SEQ ID NO: 2322 - protein, 120 aa, Artificial
  Nanobody sequence
EVQLVESGGGLVQPGGSLRLSCAASGFPFGMYGMRWVRQAPGKGPERVSSINSDGDTTYYADSVKGRFTISRDNDENMLYLQMNSLKPEDTAVYYCATGFSDRSFAVTHKGQGTQVTVSS

SEQ ID NO: 2323 - protein, 124 aa, Artificial
  Nanobody sequence
EVQLVESGGGLEQAGGSLRLSCAASGLTFRSAAMGWFRQGPGKEREFVAAISRDGAATYYTDSVKGRFTISRDNAKNTVFLQMNSLKPEDTAIYYCAADFRLARLRVADDYDYWGQGTQVTVSS

SEQ ID NO: 2324 - protein, 130 aa, Artificial
  Nanobody sequence
EVQLVESGGGLVQAGGSLRLSCAASGFSLDDRAIAWFRQAPGKAREGVSCITPHHGGIIFTRESVKGRFATSSDSAKNTVYLQMHSLKPEDTAVYYCATLRTDYSINWANCQRDSLYGYWGQGTQVTVSS

SEQ ID NO: 2325 - protein, 119 aa, Artificial
  Nanobody sequence
EMQLVESGGGLVQPGGSLRLSCAASGNIPPINAMAWYRQAPGNERELVAAVTSGGGTNYATSVKGRFIISRDDSKNTVDLQMNSLKPEDTAVYYCNLGGWTRTHPFDYWGQGTQVTVSS

SEQ ID NO: 2326 - protein, 249 aa, Artificial
  Nanobody sequence
EVQLVESGGGLVQPGGSLRLSCAASGFIFDDYAMSWVRQAPGKGLEWVSAINWSGSHRNYADSVKGRFTISRDNAKKTVYLQMNSLQSEDTAVYYCGTGWQSTTKNQGYWGQGTQVTVSSGGGGSGGGSEVQLVESGGGLVQPGGSLRLSCAASGFIFDDYAMSWVRQAPGKGLEWVSAINWSGSHRNYADSVKGRFTISRDNAKKTVYLQMNSLQSEDTAVYYCGTGWQSTTKNQGYWGQGTQVTVSS

SEQ ID NO: 2327 - protein, 257 aa, Artificial
  Nanobody sequence
EVQLVESGGGLVQPGGSLRLSCATSGFTFDDYAMTWVRQAPGKGLEWVSSINWSGTHTDYTDSVKGRFTISRNNANNTLYLQMNSLKSEDTAVYYCAKNWGDAGTTWFEKSGSAGQGTQVTVSSGGGGSGGGSEVQLVESGGGLVQPGGSLRLSCATSGFTFDDYAMTWVRQAPGKGLEWVSSINWSGTHTDYTDSVKGRFTISRNNANNTLYLQMNSLKSEDTAVYYCAKNWGDAGTTWFEKSGSAGQGTQVTVSS

SEQ ID NO: 2328 - protein, 245 aa, Artificial
  Nanobody sequence
EVQLVESGGGLVQPGGSLRLSCVASGFSLDDYGMTWVRQAPGKGLEWVSSINWSGTHTDYADSVKGRFTISRDNAKNTLFLQMNSLRSEDTAVYYCNQGWKIVPTDRTGHGTQVTVSSGGGGSGGGSEVQLVESGGGLVQPGGSLRLSCVASGFSLDDYGMTWVRQAPGKGLEWVSSINWSGTHTDYADSVKGRFTISRDNAKNTLFLQMNSLRSEDTAVYYCNQGWKIVPTDRTGHGTQVTVSS

SEQ ID NO: 2329 - protein, 257 aa, Artificial
  Nanobody sequence
EVQLVESGGSLVQPGGSLRLSCAASGFTFDDYAMSWVRQVPGKGLEWVSSINWSGTHTDYADSVKGRFTISRNNANNTLYLQMNSLKSEDTAVYYCAKNWRDAGTTWFEKSGSAGQGTQVTVSSGGGGSGGGSEVQLVESGGSLVQPGGSLRLSCAASGFTFDDYAMSWVRQVPGKGLEWVSSINWSGTHTDYADSVKGRFTISRNNANNTLYLQMNSLKSEDTAVYYCAKNWRDAGTTWFEKSGSAGQGTQVTVSS

SEQ ID NO: 2330 - protein, 245 aa, Artificial
  Nanobody sequence
EVQLVESGGGLVQAGGSLRLSCAASGITFSINTMGWYRQAPGKQRELVALISSIGDTYYADSVKGRFTISRDNAKNTVYLQMNSLKPEDTAVYYCKRFRTAAQGTDYWGQGTQVTVSSGGGGSGGGSEVQLVESGGGLVQAGGSLRLSCAASGITFSINTMGWYRQAPGKQRELVALISSIGDTYYADSVKGRFTISRDNAKNTVYLQMNSLKPEDTAVYYCKRFRTAAQGTDYWGQGTQVTVSS

SEQ ID NO: 2331 - protein, 242 aa, Artificial
  Nanobody sequence
EVQLVESGGGLVQPGGSLRLSCVASGFSLDDYGMTWVRQAPGKGLEWVSSINWSGTHTDYADSVKGRFTISRDNAKNTLFLQMNSLRSEDTAVYYCNQGWKIVPTDRTGHGTQVTVSSGGGGSGGGSEVQLVESGGGLVQPGNSLRLSCAASGFTFRSFGMSWVRQAPGKEPEWVSSISGSGSDTLYADSVKGRFTISRDNAKTTLYLQMNSLKPEDTAVYYCTIGGSLSRSSQGTQVTVSS

SEQ ID NO: 2332 - protein, 244 aa, Artificial
  Nanobody sequence
EVQLVESGGGLVQPGGSLRLSCAASGFIFDDYAMSWVRQAPGKGLEWVSAINWSGSHRNYADSVKGRFTISRDNAKKTVYLQMNSLQSEDTAVYYCGTGWQSTTKNQGYWGQGTQVTVSSGGGGSGGGSEVQLVESGGGLVQPGNSLRLSCAASGFTFRSFGMSWVRQAPGKEPEWVSSISGSGSDTLYADSVKGRFTISRDNAKTTLYLQMNSLKPEDTAVYYCTIGGSLSRSSQGTQVTVSS

SEQ ID NO: 2333 - protein, 248 aa, Artificial
  Nanobody sequence
EVQLVESGGGLVQPGGSLRLSCATSGFTFDDYAMTWVRQAPGKGLEWVSSINWSGTHTDYTDSVKGRFTISRNNANNTLYLQMNSLKSEDTAVYYCAKNWGDAGTTWFEKSGSAGQGTQVTVSSGGGGSGGGSEVQLVESGGGLVQPGNSLRLSCAASGFTFRSFGMSWVRQAPGKEPEWVSSISGSGSDTLYADSVKGRFTISRDNAKTTLYLQMNSLKPEDTAVYYCTIGGSLSRSSQGTQVTVSS

SEQ ID NO: 2334 - protein, 248 aa, Artificial
  Nanobody sequence
EVQLVESGGSLVQPGGSLRLSCAASGFTFDDYAMSWVRQVPGKGLEWVSSINWSGTHTDYADSVKGRFTISRNNANNTLYLQMNSLKSEDTAVYYCAKNWRDAGTTWFEKSGSAGQGTQVTVSSGGGGSGGGSEVQLVESGGGLVQPGNSLRLSCAASGFTFRSFGMSWVRQAPGKEPEWVSSISGSGSDTLYADSVKGRFTISRDNAKTTLYLQMNSLKPEDTAVYYCTIGGSLSRSSQGTQVTVSS

SEQ ID NO: 2335 - protein, 242 aa, Artificial
  Nanobody sequence
EVQLVESGGGLVQAGGSLRLSCAASGITFSINTMGWYRQAPGKQRELVALISSIGDTYYADSVKGRFTISRDNAKNTVYLQMNSLKPEDTAVYYCKRFRTAAQGTDYWGQGTQVTVSSGGGGSGGGSEVQLVESGGGLVQPGNSLRLSCAASGFTFRSFGMSWVRQAPGKEPEWVSSISGSGSDTLYADSVKGRFTISRDNAKTTLYLQMNSLKPEDTAVYYCTIGGSLSRSSQGTQVTVSS

SEQ ID NO: 2336 - protein, 272 aa, Artificial
  Nanobody sequence
EVQLVESGGGLVQAGGSLTLSCTASETTVRIRTMAWYRQPPGNQREWVATIGSNGFATYPDSVKGRFTISRDNAKNTVYLQMNSLKPEDTAVYYCRDINRDIWGQGSQVTVSSGGGGSGGGGSGGGGSGGGGSGGGGSGGGGSGGGGSEVQLVESGGSLVQPGGSLRLSCAASGFTFDDYAMSWVRQVPGKGLEWVSSINWSGTHTDYADSVKGRFTISRNNANNTLYLQMNSLKSEDTAVYYCAKNWRDAGTTWFEKSGSAGQGTQVTVSS

SEQ ID NO: 2337 - protein, 281 aa, Artificial
  Nanobody sequence
EVQLVESGGGLVQPGGSLRLSCAASGFTFDDYATSWVRQAPGKGPEWVSAINSGGGSTYYADSVKGRFTISRDNAKNTLYLQMNSLKPEDTAVYYCARPRGSSLYLLEYDYWGQGTQVTVSSGGGGSGGGGSGGGGSGGGGSGGGGSGGGGSGGGGSEVQLVESGGSLVQPGGSLRLSCAASGFTFDDYAMSWVRQVPGKGLEWVSSINWSGTHTDYADSVKGRFTISRNNANNTLYLQMNSLKSEDTAVYYCAKNWRDAGTTWFEKSGSAGQGTQVTVSS

SEQ ID NO: 2338 - protein, 272 aa, Artificial; identical to SEQ ID NO: 2336
  Nanobody sequence

SEQ ID NO: 2339 - protein, 274 aa, Artificial
  Nanobody sequence
EVQLVESGGGLVQAGGSLRLSCAASGIISSFRTLAWYRQAPGKQRDWVATISSAGGTAYADAVKGRFTISISRDNVEYTVDLQMDSLKPEDTAVYYCRDINGDYWGQGTQVTVSSGGGGSGGGGSGGGGSGGGGSGGGGSGGGGSGGGGSEVQLVESGGSLVQPGGSLRLSCAASGFTFDDYAMSWVRQVPGKGLEWVSSINWSGTHTDYADSVKGRFTISRNNANNTLYLQMNSLKSEDTAVYYCAKNWRDAGTTWFEKSGSAGQGTQVTVSS

SEQ ID NO: 2340 - protein, 272 aa, Artificial; identical to SEQ ID NO: 2336
  Nanobody sequence

SEQ ID NO: 2341 - protein, 272 aa, Artificial; identical to SEQ ID NO: 2336
  Nanobody sequence

SEQ ID NO: 2342 - protein, 278 aa, Artificial
  Nanobody sequence
KVQLVESGGGLVQPGGSLRLSCAASGSIFGFNDMAWYRQAPGKQRELVALISRVGVTSSADSVKGRFTISRVNAKDTVYLQMNSLKPEDTAVYYCYMDQRLDGSTLAYWGQGTQVTVSSGGGGSGGGGSGGGGSGGGGSGGGGSGGGGSGGGGSEVQLVESGGSLVQPGGSLRLSCAASGFTFDDYAMSWVRQVPGKGLEWVSSINWSGTHTDYADSVKGRFTISRNNANNTLYLQMNSLKSEDTAVYYCAKNWRDAGTTWFEKSGSAGQGTQVTVSS

SEQ ID NO: 2343 - protein, 285 aa, Artificial
  Nanobody sequence
EVQLVESGGGLVQAGGSLRLSCAASGRTFRSYPMGWFRQAPGKEREFVASITGSGGSTYYADSVKGRFTISRDNAKNTVYLQMNSLRPEDTAVYSCAAYIRPDTYLSRDYRKYDYWGQGTQVTVSSGGGGSGGGGSGGGGSGGGGSGGGGSGGGGSGGGGSEVQLVESGGSLVQPGGSLRLSCAASGFTFDDYAMSWVRQVPGKGLEWVSSINWSGTHTDYADSVKGRFTISRNNANNTLYLQMNSLKSEDTAVYYCAKNWRDAGTTWFEKSGSAGQGTQVTVSS

SEQ ID NO: 2344 - protein, 283 aa, Artificial
  Nanobody sequence
EVQLVESGGSLVQPGGSLRLSCAASGFTFDDYAMSWVRQVPGKGLEWVSSINWSGTHTDYADSVKGRFTISRNNANNTLYLQMNSLKSEDTAVYYCAKNWRDAGTTWFEKSGSAGQGTQVTVSSGGGGSGGGGSGGGGSGGGGSGGGGSGGGGSGGGGSEVQLVESGGSLVQPGGSLRLSCAASGFTFDDYAMSWVRQVPGKGLEWVSSINWSGTHTDYADSVKGRFTISRNNANNTLYLQMNSLKSEDTAVYYCAKNWRDAGTTWFEKSGSAGQGTQVTVSS

SEQ ID NO: 2345 - protein, 280 aa, Artificial
  Nanobody sequence
EVQLVESGGGLVQAGGSLRLSCAASGRTFRSYPMGWFRQAPGKEREFVASITGSGGSTYYADSVKGRFTISRDNAKNTVYLQMNSLRPEDTAVYSCAAYIRPDTYLSRDYRKYDYWGQGTQVTVSSGGGGSGGGGSGGGGSGGGGSGGGGSGGGGSGGGGSEVQLVESGGGLVQPGGSLRLSCAASGSIFGFNDMAWYRQAPGKQRELVALISRVGVTSSADSVKGRFTISRVNAKDTVYLQMNSLKPEDTAVYYCYMDQRLDGSTLAYWGQGTQVTVSS

SEQ ID NO: 2346 - protein, 272 aa, Artificial
  Nanobody sequence
EVQLVESGGGLVQAGGSLRLSCAASGITFSINTMGWYRQAPGKQRELVALISSIGDTYYADSVKGRFTISRDNAKNTVYLQMNSLKPEDTAVYYCKRFRTAAQGTDYWGQGTQVTVSSGGGGSGGGGSGGGGSGGGGSGGGGSGGGGSGGGGSEVQLVESGGGLVQPGGSLRLSCAASGSIFGFNDMAWYRQAPGKQRELVALISRVGVTSSADSVKGRFTISRVNAKDTVYLQMNSLKPEDTAVYYCYMDQRLDGSTLAYWGQGTQVTVSS

SEQ ID NO: 2347 - protein, 272 aa, Artificial
  Nanobody sequence
KVQLVESGGGLVQPGGSLRLSCAASGSIFGFNDMAWYRQAPGKQRELVALISRVGVTSSADSVKGRFTISRVNAKDTVYLQMNSLKPEDTAVYYCYMDQRLDGSTLAYWGQGTQVTVSSGGGGSGGGGSGGGGSGGGGSGGGGSGGGGSGGGGSEVQLVESGGGLVQAGGSLRLSCAASGITFSINTMGWYRQAPGKQRELVALISSIGDTYYADSVKGRFTISRDNAKNTVYLQMNSLKPEDTAVYYCKRFRTAAQGTDYWGQGTQVTVSS

SEQ ID NO: 2348 - protein, 278 aa, Artificial
  Nanobody sequence
EVQLVESGGSLVQPGGSLRLSCAASGFTFDDYAMSWVRQVPGKGLEWVSSINWSGTHTDYADSVKGRFTISRNNANNTLYLQMNSLKSEDTAVYYCAKNWRDAGTTWFEKSGSAGQGTQVTVSSGGGGSGGGGSGGGGSGGGGSGGGGSGGGGSGGGGSEVQLVESGGGLVQPGGSLRLSCAASGSIFGFNDMAWYRQAPGKQRELVALISRVGVTSSADSVKGRFTISRVNAKDTVYLQMNSLKPEDTAVYYCYMDQRLDGSTLAYWGQGTQVTVSS

SEQ ID NO: 2349 - protein, 273 aa, Artificial
  Nanobody sequence
EVQLVESGGGLVQAGGSLRLSCVVSGIPSTIRAMAWYRQAPGRQRDWVATIYSPSGSAVYADSVKGRFTISSDNAKKTIYLQMNSLKPDDTAVYYCRDVNREYWGQGTQVTVSSGGGGSGGGGSGGGGSGGGGSGGGGSGGGGSGGGGSEVQLVESGGSLVQPGGSLRLSCAASGFTFDDYAMSWVRQVPGKGLEWVSSINWSGTHTDYADSVKGRFTISRNNANNTLYLQMNSLKSEDTAVYYCAKNWRDAGTTWFEKSGSAGQGTQVTVSS

SEQ ID NO: 2350 - protein, 271 aa, Artificial
  Nanobody sequence
EVQLVESGGGLVQAGGSLNLSCVASGIPFSTRTMAWYRQPPGNERDWVATIRSGAPVYADSVKGRFTVSRDNAKNTLYLQMNSLEPEDTATYYCWDVNGDIWGQGTPVTVSSGGGGSGGGGSGGGGSGGGGSGGGGSGGGGSGGGGSEVQLVESGGSLVQPGGSLRLSCAASGFTFDDYAMSWVRQVPGKGLEWVSSINWSGTHTDYADSVKGRFTISRNNANNTLYLQMNSLKSEDTAVYYCAKNWRDAGTTWFEKSGSAGQGTQVTVSS

SEQ ID NO: 2351 - protein, 271 aa, Artificial; identical to SEQ ID NO: 2350
  Nanobody sequence

SEQ ID NO: 2352 - protein, 272 aa, Artificial
  Nanobody sequence
EVQLVESGGGLVQAGGSLRLSCVTSRRPASTRTMAWYRQAPGKQRDWVATISSHGLPVYADSVKGRFTVSRDNANNTVYLQMNTLKPEDTAVYYCRDVNADYWGQGTQVTVSSGGGGSGGGGSGGGGSGGGGSGGGGSGGGGSGGGGSEVQLVESGGSLVQPGGSLRLSCAASGFTFDDYAMSWVRQVPGKGLEWVSSINWSGTHTDYADSVKGRFTISRNNANNTLYLQMNSLKSEDTAVYYCAKNWRDAGTTWFEKSGSAGQGTQVTVSS

SEQ ID NO: 2353 - protein, 272 aa, Artificial
  Nanobody sequence
EVQLVESGGGLVQPGGSLRLSCAASRIPFSTRTMAWYRQAPGKQRDWVATIGTSGPPRYADSVKGRFTVSRDNAKNTVYLQMNSLKAEDTAVYYCWDVNADYWGQGTQVTVSSGGGGSGGGGSGGGGSGGGGSGGGGSGGGGSGGGGSEVQLVESGGSLVQPGGSLRLSCAASGFTFDDYAMSWVRQVPGKGLEWVSSINWSGTHTDYADSVKGRFTISRNNANNTLYLQMNSLKSEDTAVYYCAKNWRDAGTTWFEKSGSAGQGTQVTVSS

SEQ ID NO: 2354 - protein, 272 aa, Artificial
  Nanobody sequence
EVQLVESGGGLVQPGGSLRLSCVASRIPASIRTMAWYRQTPGNQRDWLATIGSSGTPAYADSVKGRFTVSRDNAKNTVYLQMNSLKPEDTAVYYCRDVNGDYWGQGTQVTVSSGGGGSGGGGSGGGGSGGGGSGGGGSGGGGSGGGGSEVQLVESGGSLVQPGGSLRLSCAASGFTFDDYAMSWVRQVPGKGLEWVSSINWSGTHTDYADSVKGRFTISRNNANNTLYLQMNSLKSEDTAVYYCAKNWRDAGTTWFEKSGSAGQGTQVTVSS

SEQ ID NO: 2355 - protein, 283 aa, Artificial
  Nanobody sequence
KVQLVESGGSLVPPGGSLRLSCAASGFTFDDYAMTWVRQAPGKGLEWVSSINWSGTHTDYTDSVKGRFTISRNNANNTLYLQMNSLKSEDTAVYYCAKNWGDAGTTWFEKSGSAGQGTQVTVSSGGGGSGGGGSGGGGSGGGGSGGGGSGGGGSGGGGSEVQLVESGGSLVQPGGSLRLSCAASGFTFDDYAMSWVRQVPGKGLEWVSSINWSGTHTDYADSVKGRFTISRNNANNTLYLQMNSLKSEDTAVYYCAKNWRDAGTTWFEKSGSAGQGTQVTVSS

SEQ ID NO: 2356 - protein, 271 aa, Artificial; identical to SEQ ID NO: 2350
  Nanobody sequence

SEQ ID NO: 2357 - protein, 283 aa, Artificial
  Nanobody sequence
EVQLVESGGSLVQPGGSLRLSCAASGFTFDDYAMTWVRQTPGKGLEWVSSINWSGTHTDYTDSVKGRFTISRNNANNTLYLQMNSLKSDDTAVYYCAKNWGDAGTTWFEKSGSAGPGTQVTVSSGGGGSGGGGSGGGGSGGGGSGGGGSGGGGSGGGGSEVQLVESGGSLVQPGGSLRLSCAASGFTFDDYAMSWVRQVPGKGLEWVSSINWSGTHTDYADSVKGRFTISRNNANNTLYLQMNSLKSEDTAVYYCAKNWRDAGTTWFEKSGSAGQGTQVTVSS

SEQ ID NO: 2358 - protein, 272 aa, Artificial; identical to SEQ ID NO: 2352
  Nanobody sequence

SEQ ID NO: 2359 - protein, 272 aa, Artificial; identical to SEQ ID NO: 2354
  Nanobody sequence

SEQ ID NO: 2360 - protein, 272 aa, Artificial; identical to SEQ ID NO: 2352
  Nanobody sequence

SEQ ID NO: 2361 - protein, 272 aa, Artificial; identical to SEQ ID NO: 2352
  Nanobody sequence

SEQ ID NO: 2362 - protein, 272 aa, Artificial; identical to SEQ ID NO: 2352
  Nanobody sequence

SEQ ID NO: 2363 - protein, 283 aa, Artificial
  Nanobody sequence
EVQLVESGGSLVQPGGSLRLSCAASGFTFDDYAMTWVRQASGKGLEWVSSINWSGTHTDYTDSVKGRFTISRNNANNTLYLQMNSLKSEDTAVYYCAKNWGDAGTTWFEKSGSAGQGTQVTVSSGGGGSGGGGSGGGGSGGGGSGGGGSGGGGSGGGGSEVQLVESGGSLVQPGGSLRLSCAASGFTFDDYAMSWVRQVPGKGLEWVSSINWSGTHTDYADSVKGRFTISRNNANNTLYLQMNSLKSEDTAVYYCAKNWRDAGTTWFEKSGSAGQGTQVTVSS

SEQ ID NO: 2364 - protein, 276 aa, Artificial
  Nanobody sequence
EVQLVESGGGLVQAGGSLRLSCVASKMTFMRYTMGWYRQAPGKQRDLVASIDASGGTNYADSVKGRFTISRDNAKNTVYLEMNSLKPEDTGVYYCNGRWDIVGAIWWGQGTQVTVSSGGGGSGGGGSGGGGSGGGGSGGGGSGGGGSGGGGSEVQLVESGGSLVQPGGSLRLSCAASGFTFDDYAMSWVRQVPGKGLEWVSSINWSGTHTDYADSVKGRFTISRNNANNTLYLQMNSLKSEDTAVYYCAKNWRDAGTTWFEKSGSAGQGTQVTVSS

SEQ ID NO: 2365 - protein, 287 aa, Artificial
  Nanobody sequence
EVQLVESGGGLVQAGGSLRLSCAASGFTFDDYGIGWFRQASGKEREGVSCITSSDGSTYYADSVKGRFTISSDNAKNTVYLQMNSLKPEDTAVYYCAALPFVCPSGSYSDYGDEYDYWGQGTQVTVSSGGGGSGGGGSGGGGSGGGGSGGGGSGGGGSGGGGSEVQLVESGGSLVQPGGSLRLSCAASGFTFDDYAMSWVRQVPGKGLEWVSSINWSGTHTDYADSVKGRFTISRNNANNTLYLQMNSLKSEDTAVYYCAKNWRDAGTTWFEKSGSAGQGTQVTVSS

SEQ ID NO: 2366 - protein, 272 aa, Artificial
  Nanobody sequence
EVQLVESGGGLVQAGGSLRLSCAASGIAFRIRTMAWYRQAPGKQRDWVATSDSGGTTLYADSVKGRFTVSRDNAENTVYLQMNSLKPEDTAVYYCRDVNRDYWGQGTQVTVSSGGGGSGGGGSGGGGSGGGGSGGGGSGGGGSGGGGSEVQLVESGGSLVQPGGSLRLSCAASGFTFDDYAMSWVRQVPGKGLEWVSSINWSGTHTDYADSVKGRFTISRNNANNTLYLQMNSLKSEDTAVYYCAKNWRDAGTTWFEKSGSAGQGTQVTVSS

SEQ ID NO: 2367 - protein, 272 aa, Artificial
  Nanobody sequence
EVQLVESGGGLVQAGGSLSLSCVASGRFFSTRVMAWYRQTPGKQREFVASMRGSGSTNYADSVRGRFAISRDNAKNTVYLQMNTLKPEDTAVYYCRDINEDQWGQGTQVTVSSGGGGSGGGGSGGGGSGGGGSGGGGSGGGGSGGGGSEVQLVESGGSLVQPGGSLRLSCAASGFTFDDYAMSWVRQVPGKGLEWVSSINWSGTHTDYADSVKGRFTISRNNANNTLYLQMNSLKSEDTAVYYCAKNWRDAGTTWFEKSGSAGQGTQVTVSS

SEQ ID NO: 2368 - protein, 272 aa, Artificial; identical to SEQ ID NO: 2352
  Nanobody sequence

SEQ ID NO: 2369 - protein, 271 aa, Artificial; identical to SEQ ID NO: 2350
  Nanobody sequence

SEQ ID NO: 2370 - protein, 283 aa, Artificial
  Nanobody sequence
EVQLVESGGSLVQPGGSLRLSCAASGFTFDDYAMSWVRQAPGKGLEWISSINWSGTHTDYADSVKGRFTISRNNANNTLYLQMNNLKFEDTAVYYCAKNWRDAGTTWFEKSGSAGQGTQVTVSSGGGGSGGGGSGGGGSGGGGSGGGGSGGGGSGGGGSEVQLVESGGSLVQPGGSLRLSCAASGFTFDDYAMSWVRQVPGKGLEWVSSINWSGTHTDYADSVKGRFTISRNNANNTLYLQMNSLKSEDTAVYYCAKNWRDAGTTWFEKSGSAGQGTQVTVSS

SEQ ID NO: 2371 - protein, 271 aa, Artificial
  Nanobody sequence
EVQLVESGGGLVQAGGSLRLSCVASGIPSIRAIAWYRQAPGKQRDWVATSGTGYGATYDDSVKGRFTLSRDNAKNTVYLQMNSLKPEDTAVYYCRDVNRDYWGQGTQVTVSSGGGGSGGGGSGGGGSGGGGSGGGGSGGGGSGGGGSEVQLVESGGSLVQPGGSLRLSCAASGFTFDDYAMSWVRQVPGKGLEWVSSINWSGTHTDYADSVKGRFTISRNNANNTLYLQMNSLKSEDTAVYYCAKNWRDAGTTWFEKSGSAGQGTQVTVSS

SEQ ID NO: 2372 - protein, 272 aa, Artificial
  Nanobody sequence
EVQLVESGGGLVQAGGSLRLPCAASGIAFRIRTMAWYRQAPGKQRDWVATSDSGGTTLYADSVKGRFTVSRDNAENTVYLQMNSLKPEDTAVYYCRDVNRDYWGQGTQVTVSSGGGGSGGGGSGGGGSGGGGSGGGGSGGGGSGGGGSEVQLVESGGSLVQPGGSLRLSCAASGFTFDDYAMSWVRQVPGKGLEWVSSINWSGTHTDYADSVKGRFTISRNNANNTLYLQMNSLKSEDTAVYYCAKNWRDAGTTWFEKSGSAGQGTQVTVSS

SEQ ID NO: 2373 - protein, 281 aa, Artificial
  Nanobody sequence
EVQLVESGGGLVQPGGSLRLSCAASGFTFSSYAMSWVRQAPGKGLEWVSAISSGGGSITTYADSVKGRFTISRDNAKNTLYLQMSSLKPEDTALYYCAKARSSSSYYDFGSWGQGTQVTVSSGGGGSGGGGSGGGGSGGGGSGGGGSGGGGSGGGGSEVQLVESGGSLVQPGGSLRLSCAASGFTFDDYAMSWVRQVPGKGLEWVSSINWSGTHTDYADSVKGRFTISRNNANNTLYLQMNSLKSEDTAVYYCAKNWRDAGTTWFEKSGSAGQGTQVTVSS

SEQ ID NO: 2374 - protein, 283 aa, Artificial; identical to SEQ ID NO: 2363
  Nanobody sequence

SEQ ID NO: 2375 - protein, 271 aa, Artificial; identical to SEQ ID NO: 2350
  Nanobody sequence

SEQ ID NO: 2376 - protein, 272 aa, Artificial
  Nanobody sequence
EVQLVESGGGLVQAGGSLRLSCAASGIAFRIRTMAWYRQAPGKQRDWVATSDSGGTTLYADSVKGRFTVSRDNADNTVYLQMNSLKPEDTAVYYCRDVNRDYWGQGTQVTVSSGGGGSGGGGSGGGGSGGGGSGGGGSGGGGSGGGGSEVQLVESGGSLVQPGGSLRLSCAASGFTFDDYAMSWVRQVPGKGLEWVSSINWSGTHTDYADSVKGRFTISRNNANNTLYLQMNSLKSEDTAVYYCAKNWRDAGTTWFEKSGSAGQGTQVTVSS

SEQ ID NO: 2377 - protein, 277 aa, Artificial
  Nanobody sequence
EVQLVESGGGLVQPGGSLRLSCVASGFSLDDYGMTWVRQAPGKGLEWVSSINWSGTHTDYADSVKGRFTISRDNAKNTLFLQMNSLTPEDTAVYYCNQGWKILPAERRGHGTQVTVSSGGGGSGGGGSGGGGSGGGGSGGGGSGGGGSGGGGSEVQLVESGGSLVQPGGSLRLSCAASGFTFDDYAMSWVRQVPGKGLEWVSSINWSGTHTDYADSVKGRFTISRNNANNTLYLQMNSLKSEDTAVYYCAKNWRDAGTTWFEKSGSAGQGTQVTVSS

SEQ ID NO: 2378 - protein, 274 aa, Artificial
  Nanobody sequence
EVQLVESGGGLVQPGGSLRLSCAASGLGIAFSRRTMAWYRQAPGKQRDWVATIAGDGSTVYADSMKGRFTISRDNAKNTVYLQVNSLKPEDTAVYYCWDTNGDYWGQGTQVTVSSGGGGSGGGGSGGGGSGGGGSGGGGSGGGGSGGGGSEVQLVESGGSLVQPGGSLRLSCAASGFTFDDYAMSWVRQVPGKGLEWVSSINWSGTHTDYADSVKGRFTISRNNANNTLYLQMNSLKSEDTAVYYCAKNWRDAGTTWFEKSGSAGQGTQVTVSS

SEQ ID NO: 2379 - protein, 274 aa, Artificial
  Nanobody sequence
EVQLMESGGGLVQPGGSLRLSCAASGLGIAFSRRTMAWYRQAPGKQRDWVATIAGDGSTVYADSMKGRFTISRDNAENTVYLQMNSLKPEDTAVYYCWDVNRDYWGQGTQVTVSSGGGGSGGGGSGGGGSGGGGSGGGGSGGGGSGGGGSEVQLVESGGSLVQPGGSLRLSCAASGFTFDDYAMSWVRQVPGKGLEWVSSINWSGTHTDYADSVKGRFTISRNNANNTLYLQMNSLKSEDTAVYYCAKNWRDAGTTWFEKSGSAGQGTQVTVSS

SEQ ID NO: 2380 - protein, 283 aa, Artificial
  Nanobody sequence
EVQLVESGGSLVQPGGSLRLSCAASGFTFDDYAMTWVRQASGKGLEWVSSINWSGTHTDYADSVKGRFTISRNNANNTLYLQMNSLKSEDTAVYYCAKNWGDAGTTWFEKSGSAGQGTQVTVSSGGGGSGGGGSGGGGSGGGGSGGGGSGGGGSGGGGSEVQLVESGGSLVQPGGSLRLSCAASGFTFDDYAMSWVRQVPGKGLEWVSSINWSGTHTDYADSVKGRFTISRNNANNTLYLQMNSLKSEDTAVYYCAKNWRDAGTTWFEKSGSAGQGTQVTVSS

SEQ ID NO: 2381 - protein, 277 aa, Artificial
  Nanobody sequence
EVQLVESGGGLVQPGGSLRLSCVASGFSLDDYGMTWVRQAPGKGLEWVSSINWSGTHTDYADSVKGRFTISRDNAKNTLFLQMNSLSPEDTAVYYCNQGWKILPTNRGSHGTQVTVSSGGGGSGGGGSGGGGSGGGGSGGGGSGGGGSGGGGSEVQLVESGGSLVQPGGSLRLSCAASGFTFDDYAMSWVRQVPGKGLEWVSSINWSGTHTDYADSVKGRFTISRNNANNTLYLQMNSLKSEDTAVYYCAKNWRDAGTTWFEKSGSAGQGTQVTVSS

SEQ ID NO: 2382 - protein, 277 aa, Artificial
  Nanobody sequence
EVQLVESGGGLVQPGGSLRLSCVASGFSLDDYGMTWVRQAPGKGLEWVSSINWSGTHTDYADSVKGRFTISRDNAKNTLFLQMNSLTPEDTAVYYCNQGWKIIPTDRRGHGTQVTVSSGGGGSGGGGSGGGGSGGGGSGGGGSGGGGSGGGGSEVQLVESGGSLVQPGGSLRLSCAASGFTFDDYAMSWVRQVPGKGLEWVSSINWSGTHTDYADSVKGRFTISRNNANNTLYLQMNSLKSEDTAVYYCAKNWRDAGTTWFEKSGSAGQGTQVTVSS

SEQ ID NO: 2383 - protein, 276 aa, Artificial
  Nanobody sequence
EVQLVESGGGLVQAGGSLRLSCAASGSTFSINRMAWYRQSPGKQRELVAAVDNDDNTEYSDSVAGRFTISRDNAKNAVHLQMNSLRLEDTAVYYCNAKQLPYLQNFWGQGTQVTVSSGGGGSGGGGSGGGGSGGGGSGGGGSGGGGSGGGGSEVQLVESGGSLVQPGGSLRLSCAASGFTFDDYAMSWVRQVPGKGLEWVSSINWSGTHTDYADSVKGRFTISRNNANNTLYLQMNSLKSEDTAVYYCAKNWRDAGTTWFEKSGSAGQGTQVTVSS

SEQ ID NO: 2384 - protein, 276 aa, Artificial
  Nanobody sequence
EVQLVESGGGLVQAGGSLRLSCAASGITFRRYDMGWYRQFPGKERELVATILSEGDTNYVDPVKGRFTISRDNAKNTVYLQMNDLKPEDTAVYYCNGVWRAIGRTYWGQGTQVTVSSGGGGSGGGGSGGGGSGGGGSGGGGSGGGGSGGGGSEVQLVESGGSLVQPGGSLRLSCAASGFTFDDYAMSWVRQVPGKGLEWVSSINWSGTHTDYADSVKGRFTISRNNANNTLYLQMNSLKSEDTAVYYCAKNWRDAGTTWFEKSGSAGQGTQVTVSS

SEQ ID NO: 2385 - protein, 283 aa, Artificial
  Nanobody sequence
EVQLVESGGSLVPPGGSLRLSCAASGFTFDDYAMSWVRQAPGKGLEWVSSINWSGTHTGYTDSVKGRFTISRNNANNTLYLQMNSLKSEDTAVYYCAKNWGDAGTTWFEKSGSAGQGTQVTVSSGGGGSGGGGSGGGGSGGGGSGGGGSGGGGSGGGGSEVQLVESGGSLVQPGGSLRLSCAASGFTFDDYAMSWVRQVPGKGLEWVSSINWSGTHTDYADSVKGRFTISRNNANNTLYLQMNSLKSEDTAVYYCAKNWRDAGTTWFEKSGSAGQGTQVTVSS

SEQ ID NO: 2386 - protein, 283 aa, Artificial
  Nanobody sequence
EVQLVESGGSLVQPGGSLRLSCAASGFTFDDYAMTWVRQAPGKGLEWVSSINWSGTHTDYTDSVKGRFTISRNNANNTLYLQMNSLKSEDTAVYYCAKNWGDAGTTWFEKSGSAGQGTQVTVSSGGGGSGGGGSGGGGSGGGGSGGGGSGGGGSGGGGSEVQLVESGGSLVQPGGSLRLSCAASGFTFDDYAMSWVRQVPGKGLEWVSSINWSGTHTDYADSVKGRFTISRNNANNTLYLQMNSLKSEDTAVYYCAKNWRDAGTTWFEKSGSAGQGTQVTVSS

SEQ ID NO: 2387 - protein, 283 aa, Artificial
  Nanobody sequence
EVQLVESGGSLVPPGGSLRLSCAASGFTFDDYGMSWVRQAPGKGLEWVSSINWSGTHTDYTDSVKGRFTISRNNANNTLYLQMNSLKSEDTAVYYCAKNWGDAGTTWFEKSGSAGQGTQVTVSSGGGGSGGGGSGGGGSGGGGSGGGGSGGGGSGGGGSEVQLVESGGSLVQPGGSLRLSCAASGFTFDDYAMSWVRQVPGKGLEWVSSINWSGTHTDYADSVKGRFTISRNNANNTLYLQMNSLKSEDTAVYYCAKNWRDAGTTWFEKSGSAGQGTQVTVSS

SEQ ID NO: 2388 - protein, 277 aa, Artificial; identical to SEQ ID NO: 2377
  Nanobody sequence

SEQ ID NO: 2389 - protein, 277 aa, Artificial
  Nanobody sequence
EVQLVESGGGLVQPGGSLRLSCVASGFSLDDYGMTWVRQAPGKGLEWVSSINWSGTHTDYADSVKGRFTISRDNAKNTLFLQMNNLTPEDTAVYYCNQGWKIIPTDRRGHGTQVTVSSGGGGSGGGGSGGGGSGGGGSGGGGSGGGGSGGGGSEVQLVESGGSLVQPGGSLRLSCAASGFTFDDYAMSWVRQVPGKGLEWVSSINWSGTHTDYADSVKGRFTISRNNANNTLYLQMNSLKSEDTAVYYCAKNWRDAGTTWFEKSGSAGQGTQVTVSS

SEQ ID NO: 2390 - protein, 277 aa, Artificial
  Nanobody sequence
EVQLVESGGGLVQPGGSLRLSCVGSGFSLDDYAMTWVRQAPGKGLEWVSSINWSGTHTDYADSVKGRFTISRDNAKNTLFLQMNSLSPEDTAVYYCNQGWKIRPTIPMGHGTQVTVSSGGGGSGGGGSGGGGSGGGGSGGGGSGGGGSGGGGSEVQLVESGGSLVQPGGSLRLSCAASGFTFDDYAMSWVRQVPGKGLEWVSSINWSGTHTDYADSVKGRFTISRNNANNTLYLQMNSLKSEDTAVYYCAKNWRDAGTTWFEKSGSAGQGTQVTVSS

SEQ ID NO: 2391 - protein, 115 aa, Artificial [sequence omitted]

SEQ ID NO: 2392 - DNA, 21 bp, Artificial
  Primer sequence
gcgagcacccaagtgtgcacc

SEQ ID NO: 2393 - DNA, 21 bp, Artificial
  Primer sequence
ctgctcggcggggcagccctt

SEQ ID NO: 2394 - DNA, 50 bp, Artificial
  Primer sequence
ggcgcgccgactacaaagacgatgacgacaagagcacccaagtgtgcacc

SEQ ID NO: 2395 - DNA, 51 bp, Artificial
  Primer sequence
cggctcgagctattaatgagaatggtgatggtgctcggcggggcagccctt

SEQ ID NO: 2396 - DNA, 15 bp, Artificial
  Primer sequence
tgattacgccaagct

SEQ ID NO: 2397 - DNA, 53 bp, Artificial
  Primer sequence
tgattacgccaagcttgcatgcaaattctatttcaaggagattttcaacatga

SEQ ID NO: 2398 - DNA, 54 bp, Artificial
  Primer sequence
gctggattgttattactcgcggcccagccggccatggccgacatccagatgacg

SEQ ID NO: 2399 - DNA, 50 bp, Artificial
  Primer sequence
gcgtccgtcggcgatcgcgttaccatcacatgcaaagcaagtcaggacgt

SEQ ID NO: 2400 - DNA, 50 bp, Artificial
  Primer sequence
atcaacagaagccgggcaaggctccgaaattgctcatttactccgcatca

SEQ ID NO: 2401 - DNA, 50 bp, Artificial
  Primer sequence
ttcccgtttcagcggaagcggctcgggtactgattttaccctgactatct

SEQ ID NO: 2402 - DNA, 50 bp, Artificial
  Primer sequence
ttcgccacctactattgtcagcaatactatatttacccgtatacctttgg

SEQ ID NO: 2403 - DNA, 50 bp, Artificial
  Primer sequence
attaaacgtacggtagctgcccctagcgtgtttatctttccgccttccga

SEQ ID NO: 2404 - DNA, 50 bp, Artificial
  Primer sequence
cggccagcgtcgtatgtttactgaataacttctatccgcgcgaagctaaa

SEQ ID NO: 2405 - DNA, 50 bp, Artificial
  Primer sequence
tgcactgcagtccggcaattctcaagaatccgtgacggaacaagatagca

SEQ ID NO: 2406 - DNA, 50 bp, Artificial
  Primer sequence
agctctaccctgaccttgtcaaaggcagattatgaaaaacacaaagttta

SEQ ID NO: 2407 - DNA, 45 bp, Artificial
  Primer sequence
ccatcagggactttcgagtccggttacaaagtcttttaaccgcgg

SEQ ID NO: 2408 - DNA, 53 bp, Artificial
  Primer sequence
taataacaatccagcggctgccgtaggcaataggtatttcatgttgaaaatct

SEQ ID NO: 2409 - DNA, 54 bp, Artificial
  Primer sequence
atcgccgacggacgcgctcaggctactcggagattgcgtcatctggatgtcggc

SEQ ID NO: 2410 - DNA, 50 bp, Artificial
  Primer sequence
ccggcttctgttgataccaagcaaccccgatagatacgtcctgacttgct

SEQ ID NO: 2411 - DNA, 50 bp, Artificial
  Primer sequence
ccgctgaaacgggaaggcacaccggtgtaacgatatgatgcggagtaaat

SEQ ID NO: 2412 - DNA, 50 bp, Artificial
  Primer sequence
atagtaggtggcgaagtcctctggctgcaggctagagatagtcagggtaa

SEQ ID NO: 2413 - DNA, 50 bp, Artificial
  Primer sequence
taccgtacgtttaatttccactttcgtaccctggccaaaggtatacgggt

SEQ ID NO: 2414 - DNA, 15 bp, Artificial
  Primer sequence
tcggaaggcggaaag

SEQ ID NO: 2415 - DNA, 50 bp, Artificial
  Primer sequence
atacgacgctggccgtaccacttttcagctgctcgtcggaaggcggaaag

SEQ ID NO: 2416 - DNA, 50 bp, Artificial
  Primer sequence
ccggactgcagtgcattatccactttccattggactttagcttcgcgcgg

SEQ ID NO: 2417 - DNA, 50 bp, Artificial
  Primer sequence
ggtcagggtagagctcagtgagtaagtgctatctttgctatcttgttccg

SEQ ID NO: 2418 - DNA, 45 bp, Artificial
  Primer sequence
gaaagtccctgatgggtcacttcacaggcgtaaactttgtgtttt

SEQ ID NO: 2419 - DNA, 46 bp, Artificial
  Primer sequence
aaatagaattggcgcgccttattagcactcaccgcggttaaaagac

SEQ ID NO: 2420 - DNA, 15 bp, Artificial
  Primer sequence
aaatagaattggcgc

SEQ ID NO: 2421 - DNA, 15 bp, Artificial
  Primer sequence
gtgctaataaggcgc

SEQ ID NO: 2422 - DNA, 50 bp, Artificial
  Primer sequence
gtgctaataaggcgcgccaattctatttcaaggagacagtcatagtgaaa

SEQ ID NO: 2423 - DNA, 50 bp, Artificial
  Primer sequence
tttagtggtacctttctattctcactccgaggttcagctggtggaaagcg

SEQ ID NO: 2424 - DNA, 50 bp, Artificial
  Primer sequence
ggcggttctctgcgtctgagctgcgctgcctccggtttcacgttcactga

SEQ ID NO: 2425 - DNA, 50 bp, Artificial
  Primer sequence
gccaggcgccgggtaaaggccttgaatgggtggccgacgtaaaccctaac

SEQ ID NO: 2426 - DNA, 50 bp, Artificial
  Primer sequence
ccaacgttttaagggtcgtttcaccctgagcgtagatcgctctaaaaaca

SEQ ID NO: 2427 - DNA, 50 bp, Artificial
  Primer sequence
tcgctgcgtgcagaagacaccgctgtttattactgtgcacgcaatctggg

SEQ ID NO: 2428 - DNA, 50 bp, Artificial
  Primer sequence
attggggccaaggcacgttggtcaccgtgagtagcgcaagcactaaaggt

SEQ ID NO: 2429 - DNA, 50 bp, Artificial
  Primer sequence
acctttagtgcttgcgctactcacggtgaccaacgtgccttggccccaat

SEQ ID NO: 2430 - DNA, 50 bp, Artificial
  Primer sequence
cccaagctcgaaatccacgtccggtggcaccgccgcgctgggctgtctgg

SEQ ID NO: 2431 - DNA, 50 bp, Artificial
  Primer sequence
ccggtcactgtctcctggaactcgggtgcacttacctcgggtgtacatac

SEQ ID NO: 2432 - DNA, 50 bp, Artificial
  Primer sequence
ctagcggcttgtatagcctgtcaagcgttgtgaccgtgccttcaagctct

SEQ ID NO: 2433 - DNA, 50 bp, Artificial
  Primer sequence
ttgcaatgtgaaccacaaaccgagtaacaccaaagtggataagaaagtgg

SEQ ID NO: 2434 - DNA, 50 bp, Artificial
  Primer sequence
aaaggtaccactaaaggaattgcgaataataattttttcactatgactgt

SEQ ID NO: 2435 - DNA, 50 bp, Artificial
  Primer sequence
acgcagagaaccgcctggctgcaccagcccacctccgctttccaccagct

SEQ ID NO: 2436 - DNA, 50 bp, Artificial
  Primer sequence
tttcacgttcactgattataccatggattgggttcgccaggcgccgggta

SEQ ID NO: 2437 - DNA, 50 bp, Artificial
  Primer sequence
cccttaaaacgttggttgtaaattgagccaccagagttagggtttacgtc

SEQ ID NO: 2438 - DNA, 50 bp, Artificial
  Primer sequence
ttctgcacgcagcgaattcatctgtaaatagagtgtgtttttagagcgat

SEQ ID NO: 2439 - DNA, 50 bp, Artificial
  Primer sequence
tgccttggccccaatagtcaaagtaaaaggacgggcccagattgcgtgca

SEQ ID NO: 2440 - DNA, 50 bp, Artificial
  Primer sequence
gatttcgagcttggggccagcggaaacactgacggacctttagtgcttgc

SEQ ID NO: 2441 - DNA, 15 bp, Artificial
  Primer sequence
gatttcgagcttggg

SEQ ID NO: 2442 - DNA, 50 bp, Artificial
  Primer sequence
ggagacagtgaccggttccgggaagtaatctttcaccagacagcccagcg

SEQ ID NO: 2443 - DNA, 50 bp, Artificial
  Primer sequence
tatacaagccgctagactgcaaaaccgcagggaaagtatgtacacccgag

SEQ ID NO: 2444 - DNA, 50 bp, Artificial
  Primer sequence
tggttcacattgcaaatatacgtctgggtgcccagagagcttgaaggcac

SEQ ID NO: 2445 - DNA, 47 bp, Artificial
  Primer sequence
tttttgttctgcggccgcacagctcttcggttccactttcttatcca

SEQ ID NO: 2446 - DNA, 15 bp, Artificial
  Primer sequence
tttttgttctgcggc
